(19) United States
(12) Patent Application Publication
(10) Pub. No.: US 2006/0263786 A1
(43) Pub. Date: Nov. 23, 2006

(54) Novel nucleotide and amino acid sequences, and assays and methods of use thereof for diagnosis of colon cancer

(76) Inventors: Rotem Sorek, Rechovot (IL); Michal Ayalon-Soffer, Ramat-HaSharon (IL); Dvir Dahary, Tel-Aviv (IL); Amit Novik, Beit-HaSharon (IL); Amir Toporik, Azur (IL); Alexander Diber, Richon-LeZion (IL); Guy Kol, Givat Shmuel (IL); Sarah Pollock, Tel-Aviv (IL); Zurit Levine, Herzlia (IL); Gad S. Coiocaru, Ramat-HaSharon (IL); Ronen Shemesh, Modiln (IL); Yossi Cohen, Banstead (GB); Osnat Sella-Tavor, Kfar Kish (IL); Shirley Sameah-Greenwald, Kfar-Saba (IL); Shira Walach, Hod-HaSharon (IL)

Correspondence Address: STAAS & HALSEY LLP, SUITE 700, 1201 NEW YORK AVENUE, N.W., WASHINGTON, DC, 20005, US

(21) Appl. No.: 11/050,875

(22) Filed: Jan. 27, 2005

Related U.S. Application Data
(60) Provisional application No. 60/620,916, filed on Oct. 22, 2004.
(60) Provisional application No. 60/628,123, filed on Nov. 17, 2004.
(60) Provisional application No. 60/621,131, filed on Oct. 25, 2004.
(60) Provisional application No. 60/620,917, filed on Oct. 22, 2004.
(60) Provisional application No. 60/628,101, filed on Nov. 17, 2004.
(60) Provisional application No. 60/620,874, filed on Oct. 22, 2004.
(60) Provisional application No. 60/628,134, filed on Nov. 17, 2004.
(60) Provisional application No. 60/620,924, filed on Oct. 22, 2004.
(60) Provisional application No. 60/628,111, filed on Nov. 17, 2004.
(60) Provisional application No. 60/620,853, filed on Oct. 22, 2004.
(60) Provisional application No. 60/628,112, filed on Nov. 17, 2004.
(60) Provisional application No. 60/620,974, filed on Oct. 22, 2004.
(60) Provisional application No. 60/628,145, filed on Nov. 17, 2004.
(60) Provisional application No. 60/620,656, filed on Oct. 22, 2004.
(60) Provisional application No. 60/628,251, filed on Nov. 17, 2004.
(60) Provisional application No. 60/620,975, filed on Oct. 22, 2004.
(60) Provisional application No. 60/628,178, filed on Nov. 17, 2004.
(60) Provisional application No. 60/622,320, filed on Oct. 27, 2004.
(60) Provisional application No. 60/628,190, filed on Nov. 17, 2004.
(60) Provisional application No. 60/630,559, filed on Nov. 26, 2004.
(60) Provisional application No. 60/628,231, filed on Nov. 17, 2004.
(60) Provisional application No. 60/620,918, filed on Oct. 22, 2004.
(60) Provisional application No. 60/628,156, filed on Nov. 17, 2004.
(60) Provisional application No. 60/628,189, filed on Nov. 17, 2004.
(60) Provisional application No. 60/621,053, filed on Oct. 25, 2004.
(60) Provisional application No. 60/539,129, filed on Jan. 27, 2004.
(60) Provisional application No. 60/539,128, filed on Jan. 27, 2004.

(51) Int. Cl. C12Q 1/68; G01N 33/574; C07H 21/04; C12P 21/06; C07K 14/82

(52) U.S. Cl. 435/6; 435/7.23; 435/69.1; 435/320.1; 435/325; 530/350; 536/23.5

(57) ABSTRACT

Novel markers for colon cancer that are both sensitive and accurate. These markers are overexpressed in colon cancer specifically, as opposed to normal colon tissue. The measurement of these markers, alone or in combination, in patient samples provides information that the diagnostician can correlate with a probable diagnosis of colon cancer. The markers of the present invention, alone or in combination, show a high degree of differential detection between colon cancer and non-cancerous states.

### CROSS-REFERENCE TO RELATED APPLICATION(S)

[0001] This application is related to Novel Nucleotide and Amino Acid Sequences, and Assays and Methods of use thereof for Diagnosis of Colon Cancer, and claims priority to the below U.S. provisional applications which are incorporated by reference herein:

[0002] Application No. 60/620,916 filed Oct. 22, 2004—Differential Expression of Markers in Colon Cancer

[0003] Application No. 60/628,123 filed Nov. 17, 2004—Differential Expression of Markers in Colon Cancer II

[0004] Application No. 60/621,131 filed Oct. 25, 2004—Diagnostic Markers for Colon Cancer, and Assays and Methods of use thereof.

[0005] Application No. 60/620,917 filed Oct. 22, 2004—Differential Expression of Markers in Breast Cancer

[0006] Application No. 60/628,101 filed Nov. 17, 2004-Differential Expression of Markers in Breast Cancer II

[0007] Application No. 60/620,874 filed Oct. 22, 2004—Differential Expression of Markers in Ovarian Cancer

[0008] Application No. 60/628,134 filed Nov. 17, 2004—Differential Expression of Markers in Ovarian Cancer II

[0009] Application No. 60/620,924 filed Oct. 22, 2004—Differential Expression of Markers in Stomach Cancer

[0010] Application No. 60/628,111 filed Nov. 17, 2004—Differential Expression of Markers in Stomach Cancer II

[0011] Application No. 60/620,853 filed Oct. 22, 2004-28814—Differential Expression of Markers in Lung Cancer

[0012] Application No. 60/628,112 filed Nov. 17, 2004—Differential Expression of Markers in Lung Cancer II

[0013] Application No. 60/620,974 filed Oct. 22, 2004—Differential Expression of Markers in Pancreatic Cancer

[0014] Application No. 60/628,145 filed Nov. 17, 2004—Differential Expression of Markers in Pancreatic Cancer II

[0015] Application No. 60/620,656 filed Oct. 22, 2004—Differential Expression of Markers in Prostate Cancer

[0016] Application No. 60/628,251 filed Nov. 17, 2004—Differential Expression of Markers in Prostate Cancer II

[0017] Application No. 60/620,975 filed Oct. 22, 2004—Differential Expression of Markers in Brain Cancer

[0018] Application No. 60/628,178 filed Nov. 17, 2004—Differential Expression of Markers in Brain Cancer II

[0019] Application No. 60/622,320 filed Oct. 27, 2004—Diagnostic Markers for Cardiac Disease and/or Pathological Conditions, and Assays and methods of Use thereof.

[0020] Application No. 60/628,190 filed Nov. 17, 2004—Diagnostic Markers for Cardiac Disease and/or Pathological Conditions, and Assays and Methods of Use thereof II

[0021] Application No. 60/630,559 filed Nov. 26, 2004—Diagnostic Markers for Cardiac Disease and/or Pathological Conditions, and Assays and Methods of Use thereof II

[0022] Application No. 60/628,231 filed Nov. 17, 2004—Novel Diagnostic Serum Markers, and Assays and Methods of Use thereof.

[0023] Application No. 60/620,918 filed Oct. 22, 2004—Diagnostic Markers for Renal Cancer, and Assays and Methods of Use thereof.

[0024] Application No. 60/628,156 filed Nov. 17, 2004—Diagnostic Markers for Renal Cancer, and Assays and Methods of Use thereof II

[0025] Application No. 60/628,189 filed Nov. 17, 2004—Differential Expression of Markers in Uterine Cancer II

[0026] Application No. 60/621,053 filed Oct. 25, 2004—Variants of CD117, Use as Diagnostic Markers, and Assays and Methods of Use thereof.

[0027] Application No. ______ filed Dec. 8, 2004—Variants of CD117, Use as Diagnostic Markers, and Assays and Methods of Use thereof II

[0028] Application No. 60/539,129 filed Jan. 27, 2004—Methods and Systems for Annotating Biomolecular Sequences

[0029] Application No. 60/539,128 filed Jan. 27, 2004—Evolutionary Conserved Spliced Sequences and Methods and Systems for Identifying thereof

### FIELD OF THE INVENTION

[0030] The present invention is related to novel nucleotide and protein sequences that are diagnostic markers for colon cancer, and assays and methods of use thereof.

### BACKGROUND OF THE INVENTION

[0031] Colon and rectal cancers are malignant conditions which occur in the corresponding segments of the large intestine. These cancers are sometimes referred to jointly as “colorectal cancer”, and, in many respects, the diseases are considered identical. The major differences between them are the sites where the malignant growths occur and the fact that treatments may differ based on the location of the tumors.

[0032] More than 95 percent of cancers of the colon and rectum are adenocarcinomas, which develop in glandular cells lining the inside (lumen) of the colon and rectum. In addition to adenocarcinomas, there are other rarer types of cancers of the large intestine: these include carcinoid tumors usually found in the appendix and rectum; gastrointestinal stromal tumors found in connective tissue in the wall of the colon and rectum; and lymphomas, which are malignancies of immune cells in the colon, rectum and lymph nodes. As with other malignant conditions, a number of genetic abnormalities have been associated with colon tumors (Bos et al, (1987) Nature 327:293-297; Baker et al, (1989) 244:217-221; Nishisho et al, (1991) 253:665-669).

[0033] Colorectal cancer is the second most common cause of cancer death in the United States and the third most prevalent cancer in both men and women. Approximately 100,000 patients every year suffer from colon cancer and approximately half that number die of the disease. In large part this death rate is due to the inability to diagnose the disease at an early stage (Wanebo (1993) Colorectal Cancer, Mosby, St. Louis Mo.). In fact, the prognosis for a case of colon cancer is vastly enhanced when malignant tissue is detected at the early stage known as polyps. Polyps are usually benign growths protruding from the mucous membrane. Nearly all cases of colorectal cancer arise from adenomatous polyps, some of which mature into large polyps, undergo abnormal growth and development, and ultimately progress into cancer. This progression would appear to take at least 10 years in most patients, rendering it a readily treatable form of cancer if diagnosed early, when the cancer is localized. Simple removal of malignant polyps (polypectomy) through colonoscopy is now routine, and curing the condition from this procedure is effectively guaranteed. However, early detection of polyps and tumors depends on diligent and ongoing examination of patients at risk. The most reliable detection procedures to date include fecal occult blood tests, sigmoidoscopy, barium enema X-ray, digital rectal exam, and colonoscopy. Normally a malignant colon cancer will not cause noticeable symptoms (e.g., bowel obstruction, abdominal pain, anemia) until it has reached an advanced and far more serious stage of malignancy. At these stages, only risky, traumatic and/or invasive procedures are available, including chemotherapy, radiation therapy, and colonectomy.

[0034] Although current understanding of the etiology of colon cancer is undergoing continual refinement, extensive research in this area points to a combination of factors, including age, hereditary and non-hereditary conditions, and environmental/dietary factors. Age is a key risk factor in the development of colorectal cancer, since men and women over 40 years of age become increasingly susceptible to that cancer. Incidence rates increase considerably in each subsequent decade of life. A number of hereditary and nonhereditary conditions have also been linked to a heightened risk of developing colorectal cancer, including familial adenomatous polyposis (FAP), hereditary nonpolyposis colorectal cancer (Lynch syndrome or HNPCC), a personal and/or family history of colorectal cancer or adenomatous polyps, inflammatory bowel disease, diabetes mellitus, and obesity.

[0035] In the case of FAP, the tumor suppressor gene APC (adenomatous polyposis coli), located at 5q21, has been either mutationally inactivated or deleted (Alberts et al., Molecular Biology of the Cell 1288 (3d ed. 1994)). The APC protein plays a role in a number of functions, including cell adhesion, apoptosis, and repression of the c-myc oncogene. Of those patients with colorectal cancer who have normal APC genes, over 65% have such mutations in the cancer cells but not in other tissues. In the case of HPNCC, patients manifest abnormalities in the tumor suppressor gene HNPCC, but only about 15% of tumors contain the mutated gene. A host of other genes have also been implicated in colorectal cancer, including the K-ras, c-Ki-ras, N-ras, H-ras and c-myc oncogenes, and the tumor suppressor genes DCC (deleted in colon carcinoma), Wg/Wnt signal transduction pathway components and p53.

[0036] Some tyrosine kinases have been shown up-regulated in colorectal tumor tissues or cell lines like HT29. Focal adhesion kinase (FAK) and its up-stream kinase c-src and c-yes in colonic epithelial cells may play an important role in the promotion of colorectal cancers through the extracellular 1 5 matrix (ECM) and integrin-mediated signaling pathways. The formation of c-src/FAK complexes may coordinately deregulate VEGF expression and apoptosis inhibition.

[0037] Recent evidences suggest that a specific signal-transduction pathway for cell survival that implicates integrin engagement leads to FAK activation and thus activates PI-3 kinase and akt. In turn, akt phosphorylates BAD and blocks apoptosis in epithelial cells. The activation of c-sre in colon cancer may induce VEGF expression through the hypoxia pathway. Other genes that may be implicated in colorectal cancer include Cox enzymes (Ota, S. et al. Aliment Pharmacol. Ther. 16 (Suppl 2): 102-106 (2002)), estrogen (alAzzawi, F. and Wahab, M. Climacteric 5: 3-14 (2002)), peroxisome proliferator-activated receptor-y (PPAR-y) (Gelman, L. et al. Cell Mol. Life Sci. 5 5: 932-943 (1999)), IGF-I (Giovannucci (2001)), thymine DNA glycosylase (TDG) (Hardeland, U. et al. Prog. Nucleic Acid Res. Mol. Biol. 68: 235-253 (2001)) and EGF (Mendelsohn, J. Endocrine Related Cancer 8: 3-9 (2001)).

[0038] Procedures used for detecting, diagnosing, monitoring, staging, and prognosticating colon cancer are of critical importance to the outcome of the patient. For example, patients diagnosed with early colon cancer generally have a much greater five-year survival rate as compared to the survival rate for patients diagnosed with distant metastasized colon cancer. Because colon cancer is highly treatable when detected at an early, localized stage, screening should be a part of routine care for all adults starting at age 50, especially those with first-degree relatives with colorectal cancer. One major advantage of colorectal cancer screening over its counterparts in other types of cancer is its ability to not only detect precancerous lesions, but to remove them as well. The key colorectal cancer screening tests in use today are fecal occult blood test, sigmoidoscopy, colonoscopy, double-contrast barium enema, and the carcinoembryonic antigen (CEA) test. New diagnostic methods which are more sensitive and specific for detecting early colon cancer are clearly needed.

[0039] Visual examination of the colon for abnormalities can be performed through endoscopic or radiographic techniques such as rigid proctosigmoidoscopy, flexible sigmoidoscopy, colonoscopy, and barium-contrast enema. These methods enable one to detect, biopsy, and remove adenomatous polyps. Despite the advantages of these procedures, there are accompanying downsides: they are expensive, and uncomfortable, and also carry with them a risk of complications. Sigmoidoscopy, by definition, is limited to the sigmoid colon and below, colonoscopy is a relatively expensive procedure, and both share the risk of possible bowel perforation and hemorrhaging. Double-contrast barium enema (DCBE) enables detection of lesions better than FOBT, and almost as well a colonoscopy, but it may be limited in evaluating the winding rectosigmoid region.

[0040] Another method of colon cancer diagnosis is the detection of carcinoembryonic antigen (CEA) in a blood sample from a subject, which when present at high levels, may indicate the presence of advanced colon cancer. But CEA levels may also be abnormally high when no cancer is present. Thus, this test is not selective for colon cancer, which limits the test's value as an accurate and reliable diagnostic tool. In addition, elevated CEA levels are not detectable until late-stage colon cancer, when the cure rate is low, treatment options limited, and patient prognosis poor.

[0041] Several classification systems have been devised to stage the extent of colorectal cancer, including the Dukes' system and the more detailed International Union against Cancer-American Joint Committee on Cancer TNM staging system, which is considered by many in the field to be a more useful staging system. These most widely used staging systems generally use at least one of the following characteristics for staging: the extent of tumor penetration into the colon wall, with greater penetration generally correlating with a more dangerous tumor; the extent of invasion of the tumor through the colon wall and into other neighboring tissues, with greater invasion generally correlating with a more dangerous tumor; the extent of invasion of the tumor into the regional lymph nodes, with greater invasion generally correlating with a more dangerous tumor; and the extent of metastatic invasion into more distant tissues, such as the liver, with greater metastatic invasion generally correlating with a more dangerous disease state.

[0042] “Dukes A” and “Dukes B” colon cancers are neoplasia that have invaded into the wall of the colon but have not spread into other tissues. Dukes A colon cancers are cancers that have not invaded beyond the submucosa. Dukes B colon cancers are subdivided into two groups: Dukes B1 and Dukes B2. “Dukes B1” colon cancers are neoplasias that have invaded up to but not through the muscularis propria. Dukes B2 colon cancers are cancers that have breached completely through the muscularis propria. Over a five year period, patients with Dukes A cancer who receive surgical treatment (i.e. removal of the affected tissue) have a greater than 90% survival rate. Over the same period, patients with Dukes B1 and Dukes B2 cancer receiving surgical treatment have a survival rate of about 85% and 75% respectively. Dukes A, B1 and B2 cancers are also referred to as T1, T2 and T3-T4 cancers, respectively. “Dukes C” colon cancers are cancers that have spread to the regional lymph nodes, such as the lymph nodes of the gut. Patients with Dukes C cancer who receive surgical treatment alone have a 35% survival rate over a five year period, but this survival rate is increased to 60% in patients that receive chemotherapy. “Dukes D” colon cancers are cancers that have metastasized to other organs. The liver is the most common organ in which metastatic colon cancer is found. Patients with Dukes D colon cancer have a survival rate of less than 5% over a five year period, regardless of the treatment regimen.

[0043] The TNM system, which is used for either clinical or pathological staging, is divided into four stages, each of which evaluates the extent of cancer growth with respect to primary tumor (T), regional lymph nodes (N), and distant metastasis (M). The system focuses on the extent of tumor invasion into the intestinal wall, invasion of adjacent structures, the number of regional lymph nodes that have been affected, and whether distant metastasis has occurred. Stage 0 is characterized by in situ carcinoma (Tis), in which the cancer cells are located inside the glandular basement membrane (intraepithelial) or lamina propria, (intramucosal). In this stage, the cancer has not spread to the regional lymph nodes (NO), and there is no distant metastasis (N40). In stage 1, there is still no spread of the cancer to the regional lymph nodes and no distant metastasis, but the tumor has invaded the submucosa (T I) or has progressed further to invade the muscularis propria (T2). Stage R also involves no spread of the cancer to the regional lymph nodes and no distant metastasis, but the tumor has invaded the subserosa, or the nonperitonealized pericolic or perirectal tissues (T3), or has progressed to invade other organs or structures, and/or has perforated the visceral peritoneum (T4). Stage 3 is characterized by any of the T substages, no distant metastasis, and either metastasis in 1 to 3 regional lymph nodes (N1) or metastasis in four or more regional lymph nodes (N2). Lastly, stage 4 involves any of the T or N substages, as well as distant metastasis.

[0044] Currently, pathological staging of colon cancer is preferable over clinical staging as pathological staging provides a more accurate prognosis. Pathological staging typically involves examination of the resected colon section, along with surgical examination of the abdominal cavity.

### SUMMARY OF THE INVENTION

[0045] The background art does not teach or suggest markers for colon cancer that are sufficiently sensitive and/or accurate, alone or in combination. From the foregoing, it is clear that procedures used for detecting, diagnosing, monitoring, staging, prognosticating, and preventing the recurrence of colorectal cancer are of critical importance to the outcome of the patient. Moreover, current procedures, while helpful in each of these analyses, are limited by their specificity, sensitivity, invasiveness, and/or their cost. It would therefore be desirable to provide more sensitive and accurate methods and reagents for the early diagnosis, staging, prognosis, monitoring, and treatment of diseases associated with colon cancer, or to indicate a predisposition to such for preventative measures, as well as to determine whether or not such cancer has metastasized and for monitoring the progress of colon cancer in a human which has not metastasized for the onset of metastasis.

[0046] The present invention overcomes the deficiencies of the background art by providing novel markers for colon cancer that are both sensitive and accurate. Furthermore, these markers are able to distinguish between different stages of colon cancer, such as adenocarcinoma (mucinous or signet ring cell originating); leiomyocarcomas; carcinoid. Furthermore, at least some of these markers are able to distinguish, alone or in combination, between colon cancer between non-cancerous polyps. These markers are overexpressed in colon cancer specifically, as opposed to normal colon tissue. The measurement of these markers, alone or in combination, in patient samples provides information that the diagnostician can correlate with a probable diagnosis of colon cancer. The markers of the present invention, alone or in combination, show a high degree of differential detection between colon cancer and non-cancerous states.

[0047] According to preferred embodiments of the present invention, examples of suitable biological samples include but are not limited to blood, serum, plasma, blood cells, urine, sputum, saliva, stool, spinal fluid or CSF, lymph fluid, the external secretions of the skin, respiratory, intestinal, and genitourinary tracts, tears, milk, neuronal tissue, colon tissue or mucous and any human organ or tissue. In a preferred embodiment, the biological sample comprises colon tissue and/or a serum sample and/or a urine sample and/or a stool sample and/or any other tissue or liquid sample. The sample can optionally be diluted with a suitable eluant before contacting the sample to an antibody and/or performing any other diagnostic assay.

[0048] Information given in the text with regard to cellular localization was determined according to four different software programs: (i) tmhmm (from Center for Biological Sequence Analysis, Technical University of Denmark DTU, http://www.cbs.dtu.dk/services/TMHMM/TMHMM2.0b.guide.php) or (ii) tmpred (from EMBnet, maintained by the ISREC Bionformatics group and the LICR Information Technology Office, Ludwig Institute for Cancer Research, Swiss Institute of Bioinformatics, http://www.ch.embnet.org/software/TMPRED_form.html) for transmembrane region prediction; (iii) signalp_hmm or (iv) signalp_nn (both from Center for Biological Sequence Analysis, Technical University of Denmark DTU, http://www.cbs.dtu.dk/services/SignalP/background/prediction.php) for signal peptide prediction. The terms “signalp_hmm” and “signalp_nn” refer to two modes of operation for the program SignalP: hmm refers to Hidden Markov Model, while nn refers to neural networks. Localization was also determined through manual inspection of known protein localization and/or gene structure, and the use of heuristics by the individual inventor. In some cases for the manual inspection of cellular localization prediction inventors used the ProLoc computational platform [Einat Hazkani-Covo, Erez Levanon, Galit Rotman, Dan Graur and Amit Novik; (2004) “Evolution of multicellularity in metazoa: comparative analysis of the subcellular localization of proteins in Saccharomyces, Drosophila and Caenorhabditis.” Cell Biology International 2004;28(3):171-8.], which predicts protein localization based on various parameters including, protein domains (e.g., prediction of trans-membranous regions and localization thereof within the protein), pI, protein length, amino acid composition, homology to pre-annotated proteins, recognition of sequence patterns which direct the protein to a certain organelle (such as, nuclear localization signal, NLS, mitochondria localization signal), signal peptide and anchor modeling and using unique domains from Pfam that are specific to a single compartment.

[0049] Information is given in the text with regard to SNPs (single nucleotide polymorphisms). A description of the abbreviations is as follows. “T->C”, for example, means that the SNP results in a change at the position given in the table from T to C. Similarly, “M->Q”, for example, means that the SNP has caused a change in the corresponding amino acid sequence, from methionine (M) to glutamine (Q). If, in place of a letter at the right hand side for the nucleotide sequence SNP, there is a space, it indicates that a frameshift has occurred. A frameshift may also be indicated with a hyphen (-). A stop codon is indicated with an asterisk at the right hand side (*). As part of the description of an SNP, a comment may be found in parentheses after the above description of the SNP itself. This comment may include an FTId, which is an identifier to a SwissProt entry that was created with the indicated SNP. An FTId is a unique and stable feature identifier, which allows construction of links directly from position-specific annotation in the feature table to specialized protein-related databases. The FTId is always the last component of a feature in the description field, as follows: FTId=XXX_number, in which XXX is the 3-letter code for the specific feature key, separated by an underscore from a 6-digit number. In the table of the amino acid mutations of the wild type proteins of the selected splice variants of the invention, the header of the first column is “SNP position(s) on amino acid sequence”, representing a position of a known mutation on amino acid sequence. SNPs may optionally be used as diagnostic markers according to the present invention, alone or in combination with one or more other SNPs and/or any other diagnostic marker. Preferred embodiments of the present invention comprise such SNPs, including but not limited to novel SNPs on the known (WT or wild type) protein sequences given below, as well as novel nucleic acid and/or amino acid sequences formed through such SNPs, and/or any SNP on a variant amino acid and/or nucleic acid sequence described herein.

[0050] Information given in the text with regard to the Homology to the known proteins was determined by Smith-Waterman version 5.1.2 using special (non default) parameters as follows:

model=sw.model

GAPEXT=0

GAPOP=100.0

MATRIX=blosum 100

[0051] Information is given with regard to overexpression of a cluster in cancer based on ESTs. A key to the p values with regard to the analysis of such overexpression is as follows:
[0052] library-based statistics: P-value without including the level of expression in cell-lines (P1)
[0053] library based statistics: P-value including the level of expression in cell-lines (P2)
[0054] EST clone statistics: P-value without including the level of expression in cell-lines (SP1)
[0055] EST clone statistics: predicted overexpression ratio without including the level of expression in cell-lines (R3)
[0056] EST clone statistics: P-value including the level of expression in cell-lines (SP2)
[0057] EST clone statistics: predicted overexpression ratio including the level of expression in cell-lines (R4)

[0058] Library-based statistics refer to statistics over an entire library, while EST clone statistics refer to expression only for ESTs from a particular tissue or cancer.

[0059] Information is given with regard to overexpression of a cluster in cancer based on microarrays. As a microarray reference, in the specific segment paragraphs, the unabbreviated tissue name was used as the reference to the type of chip for which expression was measured. There are two types of microarray results: those from microarrays prepared according to a design by the present inventors, for which the microarray fabrication procedure is described in detail in Materials and Experimental Procedures section herein; and those results from microarrays using Affymetrix technology. As a microarray reference, in the specific segment paragraphs, the unabbreviated tissue name was used as the reference to the type of chip for which expression was measured. For microarrays prepared according to a design by the present inventors, the probe name begins with the name of the cluster (gene), followed by an identifying number. Oligonucleotide microarray results taken from Affymetrix data were from chips available from Affymetrix Inc, Santa Clara, Calif., USA (see for example data regarding the Human Genome U133 (HG-U133) Set at www.affymetrix.com/products/arrays/specific/hgu133.affx; GeneChip Human Genome U133A 2.0 Array at www.affymetrix.com/products/arrays/specific/hgu133av2.affx; and Human Genome U133 Plus 2.0 Array at www.affymetrix.com/products/arrays/specific/hgu133plus.affx). The probe names follow the Affymetrix naming convention. The data is available from NCBI Gene Expression Omnibus (see www.ncbi.nlm.nih.gov/projects/geo/ and Edgar et al, Nucleic Acids Research, 2002, Vol. 30, No. 1 207-210). The dataset (including results) is available from www.ncbi.nlm.nih.gov/geo/query/acc.cgi?acc=GSE1133 for the Series GSE1133 database (published on March 2004); a reference to these results is as follows: Su et al (Proc Natl Acad Sci USA. 2004 Apr. 20;101(16):6062-7. Epub 2004 Apr. 09). A list of probes is given below.

[0060] The following list of abbreviations for tissues was used in the TAA histograms. The term “TAA” stands for “Tumor Associated Antigen”, and the TAA histograms, given in the text, represent the cancerous tissue expression pattern as predicted by the biomarkers selection engine, as described in detail in examples 1-5 below:

[0061] “BONE” for “bone”;
[0062] “COL” for “colon”;
[0063] “EPI” for “epithelial”;
[0064] “GEN” for “general”;
[0065] “LIVER” for “liver”;
[0066] “LUN” for “lung”;
[0067] “LYMPH” for “lymph nodes”;
[0068] “MARROW” for “bone marrow”;
[0069] “OVA” for “ovary”;
[0070] “PANCREAS” for “pancreas”;
[0071] “PRO” for “prostate”;
[0072] “STOMACH” for “stomach”;
[0073] “TCELL” for “T cells”;
[0074] “THYROID” for “Thyroid”;
[0075] “MAM” for “breast”;
[0076] “BRAIN” for “brain”;
[0077] “UTERUS” for “uterus”;
[0078] “SKIN” for “skin”;
[0079] “KIDNEY” for “kidney”;
[0080] “MUSCLE” for “muscle”;
[0081] “ADREN” for “adrenal”;
[0082] “HEAD” for “head and neck”;
[0083] “BLADDER” for “bladder”;

[0084] It should be noted that the terms “segment”, “seg” and “node” are used interchangeably in reference to nucleic acid sequences of the present invention; they refer to portions of nucleic acid sequences that were shown to have one or more properties as described below. They are also the building blocks that were used to construct complete nucleic acid sequences as described in greater detail below. Optionally and preferably, they are examples of oligonucleotides which are embodiments of the present invention, for example as amplicons, hybridization units and/or from which primers and/or complementary oligonucleotides may optionally be derived, and/or for any other use.

[0085] As used herein the phrase “colon cancer” refers to cancers of the colon or colorectal cancers.

[0086] The term “marker” in the context of the present invention refers to a nucleic acid fragment, a peptide, or a polypeptide, which is differentially present in a sample taken from subjects (patients) having colon cancer as compared to a comparable sample taken from subjects who do not have colon cancer.

[0087] The phrase “differentially present” refers to differences in the quantity of a marker present in a sample taken from patients having colon cancer as compared to a comparable sample taken from patients who do not have colon cancer. For example, a nucleic acid fragment may optionally be differentially present between the two samples if the amount of the nucleic acid fragment in one sample is significantly different from the amount of the nucleic acid fragment in the other sample, for example as measured by hybridization and/or NAT-based assays. A polypeptide is differentially present between the two samples if the amount of the polypeptide in one sample is significantly different from the amount of the polypeptide in the other sample. It should be noted that if the marker is detectable in one sample and not detectable in the other, then such a marker can be considered to be differentially present.

[0088] As used herein the phrase “diagnostic” means identifying the presence or nature of a pathologic condition. Diagnostic methods differ in their sensitivity and specificity. The “sensitivity” of a diagnostic assay is the percentage of diseased individuals who test positive (percent of “true positives”). Diseased individuals not detected by the assay are “false negatives.” Subjects who are not diseased and who test negative in the assay are termed “true negatives.” The “specificity” of a diagnostic assay is 1 minus the false positive rate, where the “false positive” rate is defined as the proportion of those without the disease who test positive. While a particular diagnostic method may not provide a definitive diagnosis of a condition, it suffices if the method provides a positive indication that aids in diagnosis.

[0089] As used herein the phrase “diagnosing” refers to classifying a disease or a symptom, determining a severity of the disease, monitoring disease progression, forecasting an outcome of a disease and/or prospects of recovery. The term “detecting” may also optionally encompass any of the above.

[0090] Diagnosis of a disease according to the present invention can be effected by determining a level of a polynucleotide or a polypeptide of the present invention in a biological sample obtained from the subject, wherein the level determined can be correlated with predisposition to, or presence or absence of the disease. It should be noted that a “biological sample obtained from the subject” may also optionally comprise a sample that has not been physically removed from the subject, as described in greater detail below.

[0091] As used herein, the term “level” refers to expression levels of RNA and/or protein or to DNA copy number of a marker of the present invention.

[0092] Typically the level of the marker in a biological sample obtained from the subject is different (i.e., increased or decreased) from the level of the same variant in a similar sample obtained from a healthy individual (examples of biological samples are described herein).

[0093] Numerous well known tissue or fluid collection methods can be utilized to collect the biological sample from the subject in order to determine the level of DNA, RNA and/or polypeptide of the variant of interest in the subject.

[0094] Examples include, but are not limited to, fine needle biopsy, needle biopsy, core needle biopsy and surgical biopsy (e.g., brain biopsy), and lavage. Regardless of the procedure employed, once a biopsy/sample is obtained the level of the variant can be determined and a diagnosis can thus be made.

[0095] Determining the level of the same variant in normal tissues of the same origin is preferably effected along-side to detect an elevated expression and/or amplification and/or a decreased expression, of the variant as opposed to the normal tissues.

[0096] A “test amount” of a marker refers to an amount of a marker in a subject's sample that is consistent with a diagnosis of colon cancer. A test amount can be either in absolute amount (e.g., microgram/ml) or a relative amount (e.g., relative intensity of signals).

[0097] A “control amount” of a marker can be any amount or a range of amounts to be compared against a test amount of a marker. For example, a control amount of a marker can be the amount of a marker in a patient with colon cancer or a person without colon cancer. A control amount can be either in absolute amount (e.g., microgram/ml) or a relative amount (e.g., relative intensity of signals).

[0098] “Detect” refers to identifying the presence, absence or amount of the object to be detected.

[0099] A “label” includes any moiety or item detectable by spectroscopic, photo chemical, biochemical, immunochemical, or chemical means. For example, useful labels include ³²P, ³⁵S, fluorescent dyes, electron-dense reagents, enzymes (e.g., as commonly used in an ELISA), biotin-streptavadin, dioxigenin, haptens and proteins for which antisera or monoclonal antibodies are available, or nucleic acid molecules with a sequence complementary to a target. The label often generates a measurable signal, such as a radioactive, chromogenic, or fluorescent signal, that can be used to quantify the amount of bound label in a sample. The label can be incorporated in or attached to a primer or probe either covalently, or through ionic, van der Waals or hydrogen bonds, e.g., incorporation of radioactive nucleotides, or biotinylated nucleotides that are recognized by streptavadin. The label may be directly or indirectly detectable. Indirect detection can involve the binding of a second label to the first label, directly or indirectly. For example, the label can be the ligand of a binding partner, such as biotin, which is a binding partner for streptavadin, or a nucleotide sequence, which is the binding partner for a complementary sequence, to which it can specifically hybridize. The binding partner may itself be directly detectable, for example, an antibody may be itself labeled with a fluorescent molecule. The binding partner also may be indirectly detectable, for example, a nucleic acid having a complementary nucleotide sequence can be a part of a branched DNA molecule that is in turn detectable through hybridization with other labeled nucleic acid molecules (see, e.g., P. D. Fahrlander and A. Klausner, Bio/Technology 6:1165 (1988)). Quantitation of the signal is achieved by, e.g., scintillation counting, densitometry, or flow cytometry.

[0100] Exemplary detectable labels, optionally and preferably for use with immunoassays, include but are not limited to magnetic beads, fluorescent dyes, radiolabels, enzymes (e.g., horse radish peroxide, alkaline phosphatase and others commonly used in an ELISA), and calorimetric labels such as colloidal gold or colored glass or plastic beads. Alternatively, the marker in the sample can be detected using an indirect assay, wherein, for example, a second, labeled antibody is used to detect bound marker-specific antibody, and/or in a competition or inhibition assay wherein, for example, a monoclonal antibody which binds to a distinct epitope of the marker are incubated simultaneously with the mixture.

[0101] “Immunoassay” is an assay that uses an antibody to specifically bind an antigen. The immunoassay is characterized by the use of specific binding properties of a particular antibody to isolate, target, and/or quantify the antigen.

[0102] The phrase “specifically (or selectively) binds” to an antibody or “specifically (or selectively) immunoreactive with,” when referring to a protein or peptide (or other epitope), refers to a binding reaction that is determinative of the presence of the protein in a heterogeneous population of proteins and other biologics. Thus, under designated immunoassay conditions, the specified antibodies bind to a particular protein at least two times greater than the background (non-specific signal) and do not substantially bind in a significant amount to other proteins present in the sample. Specific binding to an antibody under such conditions may require an antibody that is selected for its specificity for a particular protein. For example, polyclonal antibodies raised to seminal basic protein from specific species such as rat, mouse, or human can be selected to obtain only those polyclonal antibodies that are specifically immunoreactive with seminal basic protein and not with other proteins, except for polymorphic variants and alleles of seminal basic protein. This selection may be achieved by subtracting out antibodies that cross-react with seminal basic protein molecules from other species. A variety of immunoassay formats may be used to select antibodies specifically immunoreactive with a particular protein. For example, solid-phase ELISA immunoassays are routinely used to select antibodies specifically immunoreactive with a protein (see, e.g., Harlow & Lane, Antibodies, A Laboratory Manual (1988), for a description of immunoassay formats and conditions that can be used to determine specific immunoreactivity). Typically a specific or selective reaction will be at least twice background signal or noise and more typically more than 10 to 100 times background.

[0103] According to preferred embodiments of the present invention, there is provided an isolated polynucleotide comprising a transcript SEQ ID NOs: 1 and 2.

[0104] According to preferred embodiments of the present invention, there is provided an isolated polynucleotide comprising a segment SEQ ID NOs: 89, 90, 91, 92, 93, 94, 95, 96, 97, 98 and 99. According to preferred embodiments of the present invention, there is provided an isolated polypeptide comprising SEQ ID NOs 534 and 535.

[0105] According to preferred embodiments of the present invention, there is provided an isolated polynucleotide comprising a transcript SEQ ID NOs: 3, 4, 5 and 6.

[0106] According to preferred embodiments of the present invention, there is provided an isolated polynucleotide comprising a segment SEQ ID NOs: 100, 101, 102, 103, 104, 105, 106 and 107.

[0107] According to preferred embodiments of the present invention, there is provided an isolated polypeptide comprising SEQ ID NOs 536, 537, 538 and 539.

[0108] According to preferred embodiments of the present invention, there is provided an isolated polynucleotide comprising a transcript SEQ ID NO. 7.

[0109] According to preferred embodiments of the present invention, there is provided an isolated polynucleotide comprising a segment SEQ ID NOs: 108, 109, 110, 111, 112, 113, 114, 115, 116, 117, 118, 119, 120, 121 and 122.

[0110] According to preferred embodiments of the present invention, there is provided an isolated polypeptide comprising SEQ ID NOs 540.

[0111] According to preferred embodiments of the present invention, there is provided an isolated polynucleotide comprising a transcript selected from the group consisting of SEQ ID NO. 8 and 9.

[0112] According to preferred embodiments of the present invention, there is provided an isolated polynucleotide comprising a segment selected from the group consisting of SEQ ID NOs: 123, 124, 125, 126, 127, 128, 129, 130, 131, 132, 133, 134, 135, 136, 137, 138, 139, 140, 141 and 142.

[0113] According to preferred embodiments of the present invention, there is provided an isolated polypeptide comprising SEQ ID NOs 541, 542.

[0114] According to preferred embodiments of the present invention, there is provided an isolated polynucleotide comprising a transcript SEQ ID NO. 10.

[0115] According to preferred embodiments of the present invention, there is provided an isolated polynucleotide comprising a segment SEQ ID NOs: 143, 144, 145, 146, 147, 148 and 149.

[0116] According to preferred embodiments of the present invention, there is provided an isolated polypeptide comprising SEQ ID NOs 543.

[0117] According to preferred embodiments of the present invention, there is provided an isolated polynucleotide comprising a transcript SEQ ID NO. 11, 12, 13 and 14.

[0118] According to preferred embodiments of the present invention, there is provided an isolated polynucleotide comprising a segment SEQ ID NOs: 150, 151, 152, 153, 154, 155, 156, 157, 158, 159, 160, 161, 162, 163, 164, 165, 166 and 167.

[0119] According to preferred embodiments of the present invention, there is provided an isolated polypeptide comprising SEQ ID NOs 544, 545, 546 and 547.

[0120] According to preferred embodiments of the present invention, there is provided an isolated polynucleotide comprising a transcript SEQ ID NO. 15.

[0121] According to preferred embodiments of the present invention, there is provided an isolated polynucleotide comprising a segment SEQ ID NOs: 168, 169, 170, 171, 172, 173, 174, 175, 176, 177, 178, 179, 180, 181, 182, 183 and 184.

[0122] According to preferred embodiments of the present invention, there is provided an isolated polypeptide comprising SEQ ID NO. 548.

[0123] According to preferred embodiments of the present invention, there is provided an isolated polynucleotide comprising a transcript SEQ ID NO. 16.

[0124] According to preferred embodiments of the present invention, there is provided an isolated polynucleotide comprising a segment SEQ ID NOs: 185, 186, 187, 188, 189, 190, 191, 192, 193, 194, 195 and 196.

[0125] According to preferred embodiments of the present invention, there is provided an isolated polypeptide comprising SEQ ID NOs 549.

[0126] According to preferred embodiments of the present invention, there is provided an isolated polynucleotide comprising a transcript SEQ ID NO. 17 and 18.

[0127] According to preferred embodiments of the present invention, there is provided an isolated polynucleotide comprising a segment SEQ ID NOs: 197, 198, 199, 200, 201, 202, 203, 204, 205, 206, 207, 208, 209, 210 and 211.

[0128] According to preferred embodiments of the present invention, there is provided an isolated polypeptide comprising SEQ ID NOs 550 and 551.

[0129] According to preferred embodiments of the present invention, there is provided an isolated polynucleotide comprising a transcript SEQ ID NO. 19, 20, 21 and 22.

[0130] According to preferred embodiments of the present invention, there is provided an isolated polynucleotide comprising a segment SEQ ID NOs: 212, 213, 214, 215, 216, 217, 218 and 219.

[0131] According to preferred embodiments of the present invention, there is provided an isolated polypeptide comprising SEQ ID NOs 552, 553, 554 and 555.

[0132] According to preferred embodiments of the present invention, there is provided an isolated polynucleotide comprising a transcript SEQ ID NO. 23, 24, 25, 26 and 27.

[0133] According to preferred embodiments of the present invention, there is provided an isolated polynucleotide comprising a segment SEQ ID NOs: 220, 221, 222, 223, 224, 225, 226, 227, 228, 229, 230, 231, 232, 233, 234, 235, 236, 237, 238, 239 and 240.

[0134] According to preferred embodiments of the present invention, there is provided an isolated polypeptide comprising SEQ ID NOs 556, 557, 558 and 559.

[0135] According to preferred embodiments of the present invention, there is provided an isolated polynucleotide comprising a transcript SEQ ID NO. 28, 29, 30, 31 and 32.

[0136] According to preferred embodiments of the present invention, there is provided an isolated polynucleotide comprising a segment SEQ ID NOs: 241, 242, 243, 244, 245, 246, 247, 248, 249, 250 and 251.

[0137] According to preferred embodiments of the present invention, there is provided an isolated polypeptide comprising SEQ ID NOs 560, 561, 562 and 563.

[0138] According to preferred embodiments of the present invention, there is provided an isolated polynucleotide comprising a transcript SEQ ID NO. 33, 34, and 35.

[0139] According to preferred embodiments of the present invention, there is provided an isolated polynucleotide comprising a segment SEQ ID NOs: 252, 253, 254, 255, 256, 257, 258, 259, 260, 261, 262, 263, 264, 265, 266, 267, 267, 269, 270, 271, 272, 273, 274, 275, 276, 277, 278, 279, 280, 281, 282, 283, 284.

[0140] According to preferred embodiments of the present invention, there is provided an isolated polypeptide comprising SEQ ID NOs 564, 565, and 566.

[0141] According to preferred embodiments of the present invention, there is provided an isolated polynucleotide comprising a transcript SEQ ID NO. 36, 37, 38, 39, 40, 41, 42 and 43.

[0142] According to preferred embodiments of the present invention, there is provided an isolated polynucleotide comprising a segment SEQ ID NOs: 285, 286, 287, 288, 289, 290, 291, 292, 293, 294, 295, 296, 297, 298, 299, 300, 301, 302, 303, 304, 305 and 306.

[0143] According to preferred embodiments of the present invention, there is provided an isolated polypeptide comprising SEQ ID NOs 567, 568, 569, 570, 571, 572, 573 and 574.

[0144] According to preferred embodiments of the present invention, there is provided an isolated polynucleotide comprising a transcript SEQ ID NO. 44.

[0145] According to preferred embodiments of the present invention, there is provided an isolated polynucleotide comprising a segment SEQ ID NOs: 307, 308, 309, 310, 311, 312, 313, 314, 315 and 316.

[0146] According to preferred embodiments of the present invention, there is provided an isolated polypeptide comprising SEQ ID NO. 575.

[0147] According to preferred embodiments of the present invention, there is provided an isolated polynucleotide comprising a transcript SEQ ID NO. 45, 46, 47 and 48.

[0148] According to preferred embodiments of the present invention, there is provided an isolated polynucleotide comprising a segment SEQ ID NOs: 317, 318, 319, 320, 321, 322, 323, 324, 325, 326, 327, 328, 329, 330, 331, 332, 333, 334, 335, 336, 337, 338, 339, 340, 341, 342, 343, 344, 345, 346, 347, 348, 349, 350, 351, 352, 353, 354, 355, 356, 357, 358, 359, 360, 361 and 362.

[0149] According to preferred embodiments of the present invention, there is provided an isolated polypeptide comprising SEQ ID NOs 576, 577, 578 and 579.

[0150] According to preferred embodiments of the present invention, there is provided an isolated polynucleotide comprising a transcript SEQ ID NO. 49.

[0151] According to preferred embodiments of the present invention, there is provided an isolated polynucleotide comprising a segment SEQ ID NOs: 363, 364 and 365.

[0152] According to preferred embodiments of the present invention, there is provided an isolated polypeptide comprising SEQ ID NO. 580.

[0153] According to preferred embodiments of the present invention, there is provided an isolated polynucleotide comprising a transcript SEQ ID NO. 50, 51, 52, 53, 54, 55 and 56.

[0154] According to preferred embodiments of the present invention, there is provided an isolated polynucleotide comprising a segment SEQ ID NOs: 366, 367, 368, 369, 370, 371, 372, 373, 374, 375, 376, 377, 378, 379, 380, 381, 382, 383, 384, 385, 386, 387, 388, 389, 390, 391, 392, 393, 394, 395, 396, 397, 398, 399, 400, 401, 402, 403, 404, 405, 406, 407, 408, 409, 410, 411, 412, 413, 414, 415, 416, 417 and 418.

[0155] According to preferred embodiments of the present invention, there is provided an isolated polypeptide comprising SEQ ID NOs 581, 582, 583, 584, 585, 586 and 587.

[0156] According to preferred embodiments of the present invention, there is provided an isolated polynucleotide comprising a transcript SEQ ID NO. 57, 58, 59, 60, 61, 62, 63, 64, 65, 66, 67, 68, 69, 70, 71, 72, 73 and 74.

[0157] According to preferred embodiments of the present invention, there is provided an isolated polynucleotide comprising a segment SEQ ID NOs: 419, 420, 421, 422, 423, 424, 425, 426, 427, 428, 429, 43, 431, 432, 433, 434, 435, 436, 437, 438, 439, 440, 441, 442, 443, 444, 445, 446, 447, 448 and 449.

[0158] According to preferred embodiments of the present invention, there is provided an isolated polypeptide comprising SEQ ID NOs 588, 589, 590, 591, 592, 593, 594, 595, 596, 597, 598, 599, 600, 601 and 602.

[0159] According to preferred embodiments of the present invention, there is provided an isolated polynucleotide comprising a transcript SEQ ID NO. 75, 76, 77, 78, 79 and 80.

[0160] According to preferred embodiments of the present invention, there is provided an isolated polynucleotide comprising a segment SEQ ID NOs: 450, 451, 452, 453, 454, 455, 456, 457, 458, 459, 460, 461, 462, 463, 464, 465, 466, 467, 468, 469, 470, 471, 472, 473, 474 and 475.

[0161] According to preferred embodiments of the present invention, there is provided an isolated polypeptide comprising SEQ ID NOs 603, 604, 605, 606 and 607.

[0162] According to preferred embodiments of the present invention, there is provided an isolated polynucleotide comprising a transcript SEQ ID NO. 81, 82, 83 and 84.

[0163] According to preferred embodiments of the present invention, there is provided an isolated polynucleotide comprising a segment SEQ ID NOs: 476, 477, 478, 479, 480, 481, 482, 483, 484, 485, 486, 487, 488, 489, 490, 491, 492, 493, 494, 495, 496, 497, 498, 499, 500, 501, 502, 503 and 504.

[0164] According to preferred embodiments of the present invention, there is provided an isolated polypeptide comprising SEQ ID NOs 608, 609, 610 and 611.

[0165] According to preferred embodiments of the present invention, there is provided an isolated polynucleotide comprising a transcript SEQ ID NO. 85, 86, 87 and 88.

[0166] According to preferred embodiments of the present invention, there is provided an isolated polynucleotide comprising a segment SEQ ID NOs: 505-532 and 533.

[0167] According to preferred embodiments of the present invention, there is provided an isolated polypeptide comprising SEQ ID NOs: 612, 613, 614 and 615.

[0168] According to preferred embodiments of the present invention, there is provided an isolated chimeric polypeptide encodings from clusters M85491, T10888, H14624, H53626, HSENA78, HUMGROG5, HUMODCA, R00299, Z19178, S67314, Z44808, Z25299, HUMF5A, HUMANK, Z39818, HUMCA1XIA, HSS100PCB, HUMPHOSLIP, D11853, R11723, M77903 and HSKITCR.

[0169] According to preferred embodiments of the present invention, there is provided an isolated chimeric polypeptide encoding for SEQ ID NO. 608, comprising a first amino acid sequence being at least 90% homologous to amino acids 1-207 of SSRA_HUMAN (SEQ ID NO:641), which also corresponds to amino acids 1-207 of SEQ ID NO. 608, and a second amino acid sequence being at least 70%, optionally at least 80%, preferably at least 85%, more preferably at least 90% and most preferably at least 95% homologous to a polypeptide corresponding to amino acids 208-214 of SEQ ID NO. 608, wherein said first amino acid sequence and second amino acid sequence are contiguous and in a sequential order.

[0170] According to preferred embodiments of the present invention, there is provided an isolated polypeptide encoding for a tail of SEQ ID NO. 608, comprising a polypeptide being at least 70%, optionally at least about 80%, preferably at least about 85%, more preferably at least about 90% and most preferably at least about 95% homologous to acids 208-214 in SEQ ID NO. 608.

[0171] According to preferred embodiments of the present invention, there is provided an isolated chimeric polypeptide encoding for SEQ ID NO. 609, comprising a first amino acid sequence being at least 90% homologous to amino acids 1-207 of SSRA_HUMAN (SEQ ID NO:641), which also corresponds to amino acids 1-207 of SEQ ID NO. 609.

[0172] According to preferred embodiments of the present invention, there is provided an isolated chimeric polypeptide encoding for SEQ ID NO. 610, comprising a first amino acid sequence being at least 90% homologous to amino acids 1-181 of SSRA_HUMAN (SEQ ID NO:641), which also corresponds to amino acids 1-181 of SEQ ID NO. 610, and a second amino acid sequence being at least 70%, optionally at least 80%, preferably at least 85%, more preferably at least 90% and most preferably at least 95% homologous to a polypeptide corresponding to amino acids 182-192 of SEQ ID NO. 610, wherein said first amino acid sequence and second amino acid sequence are contiguous and in a sequential order.

[0173] According to preferred embodiments of the present invention, there is provided an isolated polypeptide encoding for a tail of SEQ ID NO. 610, comprising a polypeptide being at least 70%, optionally at least about 80%, preferably at least about 85%, more preferably at least about 90% and most preferably at least about 95% homologous to acids 182-192 in SEQ ID NO. 610.

[0174] According to preferred embodiments of the present invention, there is provided an isolated chimeric polypeptide encoding for SEQ ID NO. 611, comprising a first amino acid sequence being at least 90% homologous to amino acids 1-93 of SSRA_HUMAN (SEQ ID NO:641), which also corresponds to amino acids 1-93 of SEQ ID NO. 611, and a second amino acid sequence being at least 70%, optionally at least 80%, preferably at least 85%, more preferably at least 90% and most preferably at least 95% homologous to a polypeptide corresponding to amino acids 94-104 of SEQ ID NO. 611, wherein said first amino acid sequence and second amino acid sequence are contiguous and in a sequential order.

[0175] According to preferred embodiments of the present invention, there is provided an isolated polypeptide encoding for a tail of SEQ ID NO. 611, comprising a polypeptide being at least 70%, optionally at least about 80%, preferably at least about 85%, more preferably at least about 90% and most preferably at least about 95% homologous to amino acids 94-104 in SEQ ID NO. 611.

[0176] According to preferred embodiments of the present invention, there is provided an isolated chimeric polypeptide encoding for SEQ ID NO. 604, comprising a first amino acid sequence being at least 70%, optionally at least 80%, preferably at least 85%, more preferably at least 90% and most preferably at least 95% homologous to a polypeptide corresponding to amino acids 1-110 of SEQ ID NO. 604, and a second amino acid sequence being at least 90% homologous to amino acids 1-112 of Q8IXM0, which also corresponds to amino acids 111-222 of SEQ ID NO. 604, wherein said first and second amino acid sequences are contiguous and in a sequential order.

[0177] According to preferred embodiments of the present invention, there is provided an isolated polypeptide encoding for a head of SEQ ID NO. 604, comprising a polypeptide being at least 70%, optionally at least about 80%, preferably at least about 85%, more preferably at least about 90% and most preferably at least about 95% homologous to amino acids 1-110 of SEQ ID NO. 604.

[0178] According to preferred embodiments of the present invention, there is provided an isolated chimeric polypeptide encoding for SEQ ID NO. 604, comprising a first amino acid sequence being at least 90% homologous to amino acids 1-83 of Q96AC2, which also corresponds to amino acids 1-83 of SEQ ID NO. 604, and a second amino acid sequence being at least 70%, optionally at least 80%, preferably at least 85%, more preferably at least 90% and most preferably at least 95% homologous to a polypeptide corresponding to amino acids 84-222 of SEQ ID NO. 604, wherein said first and second amino acid sequences are contiguous and in a sequential order.

[0179] According to preferred embodiments of the present invention, there is provided an isolated polypeptide encoding for a tail of SEQ ID NO. 604, comprising a polypeptide being at least 70%, optionally at least about 80%, preferably at least about 85%, more preferably at least about 90% and most preferably at least about 95% homologous to amino acids 84-222 in SEQ ID NO. 604.

[0180] According to preferred embodiments of the present invention, there is provided an isolated chimeric polypeptide encoding for SEQ ID NO. 604, comprising a first amino acid sequence being at least 90% homologous to amino acids 1-83 of Q8N2G4, which also corresponds to amino acids 1-83 of SEQ ID NO. 604, and a second amino acid sequence being at least 70%, optionally at least 80%, preferably at least 85%, more preferably at least 90% and most preferably at least 95% homologous to a polypeptide corresponding to amino acids 84-222 of SEQ ID NO. 604, wherein said first and second amino acid sequences are contiguous and in a sequential order.

[0181] According to preferred embodiments of the present invention, there is provided an isolated polypeptide encoding for a tail of SEQ ID NO. 604, comprising a polypeptide being at least 70%, optionally at least about 80%, preferably at least about 85%, more preferably at least about 90% and most preferably at least about 95% homologous to amino acids 84-222 in SEQ ID NO. 604.

[0182] According to preferred embodiments of the present invention, there is provided an isolated chimeric polypeptide encoding for SEQ ID NO. 604, comprising a first amino acid sequence being at least 90% homologous to amino acids 24-106 of BAC85518 (SEQ ID NO:1396), which also corresponds to amino acids 1-83 of SEQ ID NO. 604, and a second amino acid sequence being at least 70%, optionally at least 80%, preferably at least 85%, more preferably at least 90% and most preferably at least 95% homologous to a polypeptide corresponding to amino acids 84-222 of SEQ ID NO. 604, wherein said first and second amino acid sequences are contiguous and in a sequential order.

[0183] According to preferred embodiments of the present invention, there is provided an isolated polypeptide encoding for a tail of SEQ ID NO. 604, comprising a polypeptide being at least 70%, optionally at least about 80%, preferably at least about 85%, more preferably at least about 90% and most preferably at least about 95% homologous to amino acids 84-222 in SEQ ID NO. 604.

[0184] According to preferred embodiments of the present invention, there is provided an isolated chimeric polypeptide encoding for SEQ ID NO. 605, comprising a first amino acid sequence being at least 90% homologous to amino acids 1-64 of Q96AC2, which also corresponds to amino acids 1-64 of SEQ ID NO. 605, and a second amino acid sequence being at least 70%, optionally at least 80%, preferably at least 85%, more preferably at least 90% and most preferably at least 95% homologous to a polypeptide corresponding to amino acids 65-93 of SEQ ID NO. 605, wherein said first and second amino acid sequences are contiguous and in a sequential order.

[0185] According to preferred embodiments of the present invention, there is provided an isolated polypeptide encoding for a tail of SEQ ID NO. 605, comprising a polypeptide being at least 70%, optionally at least about 80%, preferably at least about 85%, more preferably at least about 90% and most preferably at least about 95% homologous to amino acids 65-93 in SEQ ID NO. 605.

[0186] According to preferred embodiments of the present invention, there is provided an isolated chimeric polypeptide encoding for SEQ ID NO. 605, comprising a first amino acid sequence being at least 90% homologous to amino acids 1-64 of Q8N2G4, which also corresponds to amino acids 1-64 of SEQ ID NO. 605, and a second amino acid sequence being at least 70%, optionally at least 80%, preferably at least 85%, more preferably at least 90% and most preferably at least 95% homologous to a polypeptide corresponding to amino acids 65-93 of SEQ ID NO. 605, wherein said first and second amino acid sequences are contiguous and in a sequential order.

[0187] According to preferred embodiments of the present invention, there is provided an isolated polypeptide encoding for a tail of SEQ ID NO. 605, comprising a polypeptide being at least 70%, optionally at least about 80%, preferably at least about 85%, more preferably at least about 90% and most preferably at least about 95% homologous to amino acids 65-93 in SEQ ID NO. 605.

[0188] According to preferred embodiments of the present invention, there is provided an isolated chimeric polypeptide encoding for SEQ ID NO. 605, comprising a first amino acid sequence being at least 70%, optionally at least 80%, preferably at least 85%, more preferably at least 90% and most preferably at least 95% homologous to a polypeptide having the sequence MWVLG corresponding to amino acids 1-5 of SEQ ID NO. 605, second amino acid sequence being at least 90% homologous to amino acids 22-80 of BAC85273 (SEQ ID NO:1397), which also corresponds to amino acids 6-64 of SEQ ID NO. 605, and a third amino acid sequence being at least 70%, optionally at least 80%, preferably at least 85%, more preferably at least 90% and most preferably at least 95% homologous to a polypeptide sequence corresponding to amino acids 65-93 of SEQ ID NO. 605, wherein said first, second and third amino acid sequences are contiguous and in a sequential order.

[0189] According to preferred embodiments of the present invention, there is provided an isolated polypeptide encoding for a head of SEQ ID NO. 605, comprising a polypeptide being at least 70%, optionally at least about 80%, preferably at least about 85%, more preferably at least about 90% and most preferably at least about 95% homologous to amino acids 1-5 of SEQ ID NO. 605.

[0190] According to preferred embodiments of the present invention, there is provided an isolated polypeptide encoding for a tail of SEQ ID NO. 605, comprising a polypeptide being at least 70%, optionally at least about 80%, preferably at least about 85%, more preferably at least about 90% and most preferably at least about 95% homologous to amino acids 65-93 in SEQ ID NO. 605.

[0191] According to preferred embodiments of the present invention, there is provided an isolated chimeric polypeptide encoding for SEQ ID NO. 605, comprising a first amino acid sequence being at least 90% homologous to amino acids 24-87 of BAC85518 (SEQ ID NO:1396), which also corresponds to amino acids 1-64 of SEQ ID NO. 605, and a second amino acid sequence being at least 70%, optionally at least 80%, preferably at least 85%, more preferably at least 90% and most preferably at least 95% homologous to a polypeptide sequence corresponding to amino acids 65-93 of SEQ ID NO. 605, wherein said first and second amino acid sequences are contiguous and in a sequential order.

[0192] According to preferred embodiments of the present invention, there is provided an isolated polypeptide encoding for a tail of SEQ ID NO. 605, comprising a polypeptide being at least 70%, optionally at least about 80%, preferably at least about 85%, more preferably at least about 90% and most preferably at least about 95% homologous to amino acids 65-93 in SEQ ID NO. 605.

[0193] According to preferred embodiments of the present invention, there is provided an isolated chimeric polypeptide encoding for SEQ ID NO. 605, comprising a first amino acid sequence being at least 90% homologous to amino acids 1-63 of Q96AC2, which also corresponds to amino acids 1-63 of SEQ ID NO. 606, and a second amino acid sequence being at least 70%, optionally at least 80%, preferably at least 85%, more preferably at least 90% and most preferably at least 95% homologous to a polypeptide sequence corresponding to amino acids 64-84 of SEQ ID NO. 606, wherein said first and second amino acid sequences are contiguous and in a sequential order.

[0194] According to preferred embodiments of the present invention, there is provided an isolated polypeptide encoding for a tail of SEQ ID NO. 606, comprising a polypeptide being at least 70%, optionally at least about 80%, preferably at least about 85%, more preferably at least about 90% and most preferably at least about 95% homologous to amino acids 64-84 in SEQ ID NO. 606.

[0195] According to preferred embodiments of the present invention, there is provided an isolated chimeric polypeptide encoding for SEQ ID NO. 607, comprising a first amino acid sequence being at least 90% homologous to amino acids 1-63 of Q96AC2, which also corresponds to amino acids 1-63 of SEQ ID NO. 607, and a second amino acid sequence being at least 70%, optionally at least 80%, preferably at least 85%, more preferably at least 90% and most preferably at least 95% homologous to a polypeptide sequence corresponding to amino acids 64-90 of SEQ ID NO. 607, wherein said first and second amino acid sequences are contiguous and in a sequential order.

[0196] According to preferred embodiments of the present invention, there is provided an isolated polypeptide encoding for a tail of SEQ ID NO. 607, comprising a polypeptide being at least 70%, optionally at least about 80%, preferably at least about 85%, more preferably at least about 90% and most preferably at least about 95% homologous to amino acids 64-90 in SEQ ID NO. 607.

[0197] According to preferred embodiments of the present invention, there is provided an isolated chimeric polypeptide encoding for SEQ ID NO. 607, comprising a first amino acid sequence being at least 90% homologous to amino acids 1-63 of Q8N2G4, which also corresponds to amino acids 1-63 of SEQ ID NO. 607, and a second amino acid sequence being at least 70%, optionally at least 80%, preferably at least 85%, more preferably at least 90% and most preferably at least 95% homologous to a polypeptide sequence corresponding to amino acids 64-90 of SEQ ID NO. 607 wherein said first and second amino acid sequences are contiguous and in a sequential order.

[0198] According to preferred embodiments of the present invention, there is provided an isolated polypeptide encoding for a tail of SEQ ID NO. 607, comprising a polypeptide being at least 70%, optionally at least about 80%, preferably at least about 85%, more preferably at least about 90% and most preferably at least about 95% homologous to amino acids 64-90 in SEQ ID NO. 607.

[0199] According to preferred embodiments of the present invention, there is provided an isolated chimeric polypeptide encoding for SEQ ID NO. 607, comprising a first amino acid sequence being at least 70%, optionally at least 80%, preferably at least 85%, more preferably at least 90% and most preferably at least 95% homologous to a polypeptide sequence corresponding to amino acids 1-5 of SEQ ID NO. 607, second amino acid sequence being at least 90% homologous to amino acids 22-79 of BAC85273 (SEQ ID NO:1397), which also corresponds to amino acids 6-63 of SEQ ID NO. 607, and a third amino acid sequence being at least 70%, optionally at least 80%, preferably at least 85%, more preferably at least 90% and most preferably at least 95% homologous to a polypeptide sequence corresponding to amino acids 64-90 of SEQ ID NO. 607, wherein said first, second and third amino acid sequences are contiguous and in a sequential order.

[0200] According to preferred embodiments of the present invention, there is provided an isolated polypeptide encoding for a head of SEQ ID NO. 607, comprising a polypeptide being at least 70%, optionally at least about 80%, preferably at least about 85%, more preferably at least about 90% and most preferably at least about 95% homologous to amino acids 1-5 of SEQ ID NO. 607.

[0201] According to preferred embodiments of the present invention, there is provided an isolated polypeptide encoding for a tail of SEQ ID NO. 607, comprising a polypeptide being at least 70%, optionally at least about 80%, preferably at least about 85%, more preferably at least about 90% and most preferably at least about 95% homologous to amino acids 64-90 in SEQ ID NO. 607.

[0202] According to preferred embodiments of the present invention, there is provided an isolated chimeric polypeptide encoding for SEQ ID NO. 607, comprising a first amino acid sequence being at least 90% homologous to amino acids 24-86 of BAC85518 (SEQ ID NO:1396), which also corresponds to amino acids 1-63 of SEQ ID NO. 607, and a second amino acid sequence being at least 70%, optionally at least 80%, preferably at least 85%, more preferably at least 90% and most preferably at least 95% homologous to a polypeptide sequence corresponding to amino acids 64-90 of SEQ ID NO. 607, wherein said first and second amino acid sequences are contiguous and in a sequential order.

[0203] According to preferred embodiments of the present invention, there is provided an isolated polypeptide encoding for a tail of SEQ ID NO. 607, comprising a polypeptide being at least 70%, optionally at least about 80%, preferably at least about 85%, more preferably at least about 90% and most preferably at least about 95% homologous to amino acids 64-90 in SEQ ID NO. 607.

[0204] According to preferred embodiments of the present invention, there is provided an isolated chimeric polypeptide encoding for SEQ ID NO. 588, comprising a first amino acid sequence being at least 70%, optionally at least 80%, preferably at least 85%, more preferably at least 90% and most preferably at least 95% homologous to a polypeptide sequence corresponding to amino acids 1-26 of SEQ ID NO. 588, a second amino acid sequence being at least 90% homologous to amino acids 13-187 of SEQ ID NO. 639, which also corresponds to amino acids 27-201 of SEQ ID NO. 588, a bridging amino acid A corresponding to amino acid 202 of SEQ ID NO. 588, and a third amino acid sequence being at least 90% homologous to amino acids 189-342 of SEQ ID NO. 639, which also corresponds to amino acids 203-356 of SEQ ID NO. 588, wherein said first amino acid sequence, second amino acid sequence, bridging amino acid and third amino acid sequence are contiguous and in a sequential order.

[0205] According to preferred embodiments of the present invention, there is provided an isolated polypeptide encoding for a head of SEQ ID NO. 588, comprising a polypeptide being at least 70%, optionally at least about 80%, preferably at least about 85%, more preferably at least about 90% and most preferably at least about 95% homologous to the sequence amino acids 1-26 of SEQ ID NO. 588.

[0206] According to preferred embodiments of the present invention, there is provided an isolated chimeric polypeptide encoding for SEQ ID NO. 588, comprising a first amino acid sequence being at least 70%, optionally at least 80%, preferably at least 85%, more preferably at least 90% and most preferably at least 95% homologous to a polypeptide sequence corresponding to amino acids 1-109 of SEQ ID NO. 588, a second amino acid sequence being at least 90% homologous to amino acids 1-159 of SEQ ID NO. 640, which also corresponds to amino acids 110-268 of SEQ ID NO. 588, and a third amino acid sequence being at least 70%, optionally at least 80%, preferably at least 85%, more preferably at least 90% and most preferably at least 95% homologous to a polypeptide sequence corresponding to amino acids 269-356 of SEQ ID NO. 588, wherein said first amino acid sequence, second amino acid sequence and third amino acid sequence are contiguous and in a sequential order.

[0207] According to preferred embodiments of the present invention, there is provided an isolated polypeptide encoding for a head of SEQ ID NO. 588, comprising a polypeptide being at least 70%, optionally at least about 80%, preferably at least about 85%, more preferably at least about 90% and most preferably at least about 95% homologous to amino acids 1-109 of SEQ ID NO. 588.

[0208] According to preferred embodiments of the present invention, there is provided an isolated polypeptide encoding for a tail of SEQ ID NO. 588, comprising a polypeptide being at least 70%, optionally at least about 80%, preferably at least about 85%, more preferably at least about 90% and most preferably at least about 95% homologous to amino acids 269-356 in SEQ ID NO. 588.

[0209] According to preferred embodiments of the present invention, there is provided an isolated chimeric polypeptide encoding for SEQ ID NO. 588, comprising a first amino acid sequence being at least 90% homologous to amino acids 1-128 of SEQ ID NO. 638, which also corresponds to amino acids 1-128 of SEQ ID NO. 588, a bridging amino acid L corresponding to amino acid 129 of SEQ ID NO. 588, and a second amino acid sequence being at least 90% homologous to amino acids 130-356 of SEQ ID NO. 638, which also corresponds to amino acids 130-356 of SEQ ID NO. 588, wherein said first amino acid sequence, bridging amino acid and second amino acid sequence are contiguous and in a sequential order.

[0210] According to preferred embodiments of the present invention, there is provided an isolated chimeric polypeptide encoding for SEQ ID NO. 589, comprising a first amino acid sequence being at least 70%, optionally at least 80%, preferably at least 85%, more preferably at least 90% and most preferably at least 95% homologous to amino acids 1-26 of SEQ ID NO. 589, a second amino acid sequence being at least 90% homologous to amino acids 13-187 of SEQ ID NO. 639, which also corresponds to amino acids 27-201 of SEQ ID NO. 589, a bridging amino acid A corresponding to amino acid 202 of SEQ ID NO. 589, a third amino acid sequence being at least 90% homologous to amino acids 189-297 of SEQ ID NO. 639, which also corresponds to amino acids 203-311 of SEQ ID NO. 589, and a fourth amino acid sequence being at least 70%, optionally at least 80%, preferably at least 85%, more preferably at least 90% and most preferably at least 95% homologous to a polypeptide sequence corresponding to amino acids 312-315 of SEQ ID NO. 589, wherein said first amino acid sequence, second amino acid sequence, bridging amino acid, third amino acid sequence and fourth amino acid sequence are contiguous and in a sequential order.

[0211] According to preferred embodiments of the present invention, there is provided an isolated polypeptide encoding for a head of SEQ ID NO. 589, comprising a polypeptide being at least 70%, optionally at least about 80%, preferably at least about 85%, more preferably at least about 90% and most preferably at least about 95% homologous to amino acids 1-26 of SEQ ID NO. 589.

[0212] According to preferred embodiments of the present invention, there is provided an isolated polypeptide encoding for a tail of SEQ ID NO. 589, comprising a polypeptide being at least 70%, optionally at least about 80%, preferably at least about 85%, more preferably at least about 90% and most preferably at least about 95% homologous to amino acids 312-315 in SEQ ID NO. 589.

[0213] According to preferred embodiments of the present invention, there is provided an isolated chimeric polypeptide encoding for SEQ ID NO. 589, comprising a first amino acid sequence being at least 70%, optionally at least 80%, preferably at least 85%, more preferably at least 90% and most preferably at least 95% homologous to a polypeptide sequence to amino acids 1-109 of SEQ ID NO. 589, a second amino acid sequence being at least 90% homologous to amino acids 1-159 of SEQ ID NO. 640, which also corresponds to amino acids 110-268 of SEQ ID NO. 589, and a third amino acid sequence being at least 70%, optionally at least 80%, preferably at least 85%, more preferably at least 90% and most preferably at least 95% homologous to a polypeptide sequence corresponding to amino acids 269-315 of SEQ ID NO. 589, wherein said first amino acid sequence, second amino acid sequence and third amino acid sequence are contiguous and in a sequential order.

[0214] According to preferred embodiments of the present invention, there is provided an isolated polypeptide encoding for a head of SEQ ID NO. 589, comprising a polypeptide being at least 70%, optionally at least about 80%, preferably at least about 85%, more preferably at least about 90% and most preferably at least about 95% homologous to amino acids 1-109 of SEQ ID NO. 589.

[0215] According to preferred embodiments of the present invention, there is provided an isolated polypeptide encoding for a tail of SEQ ID NO. 589, comprising a polypeptide being at least 70%, optionally at least about 80%, preferably at least about 85%, more preferably at least about 90% and most preferably at least about 95% homologous to amino acids 269-315 in SEQ ID NO. 589.

[0216] According to preferred embodiments of the present invention, there is provided an isolated chimeric polypeptide encoding for SEQ ID NO. 589, comprising a first amino acid sequence being at least 90% homologous to amino acids 1-128 of SEQ ID NO. 638, which also corresponds to amino acids 1-128 of SEQ ID NO. 589, a bridging amino acid L corresponding to amino acid 129 of SEQ ID NO. 589, a second amino acid sequence being at least 90% homologous to amino acids 130-311 of SEQ ID NO. 638, which also corresponds to amino acids 130-311 of SEQ ID NO. 589, and a third amino acid sequence being at least 70%, optionally at least 80%, preferably at least 85%, more preferably at least 90% and most preferably at least 95% homologous to a polypeptide sequence corresponding to amino acids 312-315 of SEQ ID NO. 589, wherein said first amino acid sequence, bridging amino acid, second amino acid sequence and third amino acid sequence are contiguous and in a sequential order.

[0217] According to preferred embodiments of the present invention, there is provided an isolated polypeptide encoding for a tail of SEQ ID NO. 589, comprising a polypeptide being at least 70%, optionally at least about 80%, preferably at least about 85%, more preferably at least about 90% and most preferably at least about 95% homologous to amino acids 312-315 in SEQ ID NO. 589.

[0218] According to preferred embodiments of the present invention, there is provided an isolated chimeric polypeptide encoding for SEQ ID NO. 589, comprising a first amino acid sequence being at least 90% homologous to amino acids 1-311 of Q9UJZ1 (SEQ ID NO:637), which also corresponds to amino acids 1-311 of SEQ ID NO. 589, and a second amino acid sequence being at least 70%, optionally at least 80%, preferably at least 85%, more preferably at least 90% and most preferably at least 95% homologous to a polypeptide sequence corresponding to amino acids 312-315 of SEQ ID NO. 589, wherein said first amino acid sequence and second amino acid sequence are contiguous and in a sequential order.

[0219] According to preferred embodiments of the present invention, there is provided an isolated polypeptide encoding for a tail of SEQ ID NO. 589, comprising a polypeptide being at least 70%, optionally at least about 80%, preferably at least about 85%, more preferably at least about 90% and most preferably at least about 95% homologous to amino acids 312-315 in SEQ ID NO. 589.

[0220] According to preferred embodiments of the present invention, there is provided an isolated chimeric polypeptide encoding for SEQ ID NO. 589, comprising a first amino acid sequence being at least 70%, optionally at least 80%, preferably at least 85%, more preferably at least 90% and most preferably at least 95% homologous to a polypeptide sequence corresponding to amino acids 1-109 of SEQ ID NO. 589, a second amino acid sequence being at least 90% homologous to amino acids 1-159 of SEQ ID NO. 640, which also corresponds to amino acids 110-268 of SEQ ID NO. 589, and a third amino acid sequence being at least 70%, optionally at least 80%, preferably at least 85%, more preferably at least 90% and most preferably at least 95% homologous to a polypeptide sequence corresponding to amino acids 269-315 of SEQ ID NO. 589, wherein said first amino acid sequence, second amino acid sequence and third amino acid sequence are contiguous and in a sequential order.

[0221] According to preferred embodiments of the present invention, there is provided an isolated polypeptide encoding for a head of SEQ ID NO. 589, comprising a polypeptide being at least 70%, optionally at least about 80%, preferably at least about 85%, more preferably at least about 90% and most preferably at least about 95% homologous to amino acids 1-109 of SEQ ID NO. 589.

[0222] According to preferred embodiments of the present invention, there is provided an isolated polypeptide encoding for a tail of SEQ ID NO. 589, comprising a polypeptide being at least 70%, optionally at least about 80%, preferably at least about 85%, more preferably at least about 90% and most preferably at least about 95% homologous to amino acids 269-315 in SEQ ID NO. 589.

[0223] According to preferred embodiments of the present invention, there is provided an isolated chimeric polypeptide encoding for SEQ ID NO. 589, comprising a first amino acid sequence being at least 90% homologous to amino acids 1-128 of SEQ ID NO. 638, which also corresponds to amino acids 1-128 of SEQ ID NO. 589, a bridging amino acid L corresponding to amino acid 129 of SEQ ID NO. 589, a second amino acid sequence being at least 90% homologous to amino acids 130-311 of SEQ ID NO. 638, which also corresponds to amino acids 130-311 of SEQ ID NO. 589, and a third amino acid sequence being at least 70%, optionally at least 80%, preferably at least 85%, more preferably at least 90% and most preferably at least 95% homologous to a polypeptide sequence corresponding to amino acids 312-315 of SEQ ID NO. 589, wherein said first amino acid sequence, bridging amino acid, second amino acid sequence and third amino acid sequence are contiguous and in a sequential order.

[0224] According to preferred embodiments of the present invention, there is provided an isolated polypeptide encoding for a tail of SEQ ID NO. 589, comprising a polypeptide being at least 70%, optionally at least about 80%, preferably at least about 85%, more preferably at least about 90% and most preferably at least about 95% homologous to amino acids 312-315 in SEQ ID NO. 589.

[0225] According to preferred embodiments of the present invention, there is provided an isolated chimeric polypeptide encoding for SEQ ID NO. 589, comprising a first amino acid sequence being at least 90% homologous to amino acids 1-311 of Q9UJZ1 (SEQ ID NO:637), which also corresponds to amino acids 1-311 of SEQ ID NO. 589, and a second amino acid sequence being at least 70%, optionally at least 80%, preferably at least 85%, more preferably at least 90% and most preferably at least 95% homologous to a polypeptide sequence corresponding to amino acids 312-315 of SEQ ID NO. 589, wherein said first amino acid sequence and second amino acid sequence are contiguous and in a sequential order.

[0226] According to preferred embodiments of the present invention, there is provided an isolated polypeptide encoding for a tail of SEQ ID NO. 589, comprising a polypeptide being at least 70%, optionally at least about 80%, preferably at least about 85%, more preferably at least about 90% and most preferably at least about 95% homologous to amino acids 312-315 in SEQ ID NO. 589.

[0227] According to preferred embodiments of the present invention, there is provided an isolated chimeric polypeptide encoding for SEQ ID NO. 590, comprising a first amino acid sequence being at least 70%, optionally at least 80%, preferably at least 85%, more preferably at least 90% and most preferably at least 95% homologous to a polypeptide sequence corresponding to amino acids 1-26 of SEQ ID NO. 590, a second amino acid sequence being at least 90% homologous to amino acids 13-187 of Q9P₀₄₂ (SEQ ID NO:639), which also corresponds to amino acids 27-201 of SEQ ID NO. 590, a bridging amino acid A corresponding to amino acid 202 of SEQ ID NO. 590, a third amino acid sequence being at least 90% homologous to amino acids 189-254 of SEQ ID NO. 639, which also corresponds to amino acids 203-268 of SEQ ID NO. 590, and a fourth amino acid sequence being at least 70%, optionally at least 80%, preferably at least 85%, more preferably at least 90% and most preferably at least 95% homologous to a polypeptide sequence corresponding to amino acids 269-290 of SEQ ID NO. 590, wherein said first amino acid sequence, second amino acid sequence, bridging amino acid, third amino acid sequence and fourth amino acid sequence are contiguous and in a sequential order.

[0228] According to preferred embodiments of the present invention, there is provided an isolated polypeptide encoding for a head of SEQ ID NO. 590, comprising a polypeptide being at least 70%, optionally at least about 80%, preferably at least about 85%, more preferably at least about 90% and most preferably at least about 95% homologous to amino acids 1-26 of SEQ ID NO. 590.

[0229] According to preferred embodiments of the present invention, there is provided an isolated polypeptide encoding for a tail of SEQ ID NO. 590, comprising a polypeptide being at least 70%, optionally at least about 80%, preferably at least about 85%, more preferably at least about 90% and most preferably at least about 95% homologous to amino acids 269-290 in SEQ ID NO. 590.

[0230] According to preferred embodiments of the present invention, there is provided an isolated chimeric polypeptide encoding for SEQ ID NO. 590, comprising a first amino acid sequence being at least 70%, optionally at least 80%, preferably at least 85%, more preferably at least 90% and most preferably at least 95% homologous to a polypeptide sequence corresponding to amino acids 1-109 of SEQ ID NO. 590, and a second amino acid sequence being at least 90% homologous to corresponding to amino acids 1-181 of SEQ ID NO. 640, which also corresponds to amino acids 110-290 of SEQ ID NO. 590, wherein said first amino acid sequence and second amino acid sequence are contiguous and in a sequential order.

[0231] According to preferred embodiments of the present invention, there is provided an isolated polypeptide encoding for a head of SEQ ID NO. 590, comprising a polypeptide being at least 70%, optionally at least about 80%, preferably at least about 85%, more preferably at least about 90% and most preferably at least about 95% homologous to amino acids 1-109 of SEQ ID NO. 590.

[0232] According to preferred embodiments of the present invention, there is provided an isolated chimeric polypeptide encoding for SEQ ID NO. 590, comprising a first amino acid sequence being at least 90% homologous to amino acids 1-128 of SEQ ID NO. 638, which also corresponds to amino acids 1-128 of SEQ ID NO. 590, a bridging amino acid L corresponding to amino acid 129 of SEQ ID NO. 590, a second amino acid sequence being at least 90% homologous to amino acids 130-268 of SEQ ID NO. 638, which also corresponds to amino acids 130-268 of SEQ ID NO. 590, and a third amino acid sequence being at least 70%, optionally at least 80%, preferably at least 85%, more preferably at least 90% and most preferably at least 95% homologous to a polypeptide sequence corresponding to amino acids 269-290 of SEQ ID NO. 590, wherein said first amino acid sequence, bridging amino acid, second amino acid sequence and third amino acid sequence are contiguous and in a sequential order.

[0233] According to preferred embodiments of the present invention, there is provided an isolated polypeptide encoding for a tail of SEQ ID NO. 590, comprising a polypeptide being at least 70%, optionally at least about 80%, preferably at least about 85%, more preferably at least about 90% and most preferably at least about 95% homologous to amino acids 269-290 in SEQ ID NO. 590.

[0234] According to preferred embodiments of the present invention, there is provided an isolated chimeric polypeptide encoding for SEQ ID NO. 590, comprising a first amino acid sequence being at least 90% homologous to amino acids 1-268 of Q9UJZ1 (SEQ ID NO:637), which also corresponds to amino acids 1-268 of SEQ ID NO. 590, and a second amino acid sequence being at least 70%, optionally at least 80%, preferably at least 85%, more preferably at least 90% and most preferably at least 95% homologous to a polypeptide sequence corresponding to amino acids 269-290 of SEQ ID NO. 590, wherein said first amino acid sequence and second amino acid sequence are contiguous and in a sequential order.

[0235] According to preferred embodiments of the present invention, there is provided an isolated polypeptide encoding for a tail of SEQ ID NO. 590, comprising a polypeptide being at least 70%, optionally at least about 80%, preferably at least about 85%, more preferably at least about 90% and most preferably at least about 95% homologous to amino acids 269-290 in SEQ ID NO. 590.

[0236] According to preferred embodiments of the present invention, there is provided an isolated chimeric polypeptide encoding for SEQ ID NO. 591, comprising a first amino acid sequence being at least 70%, optionally at least 80%, preferably at least 85%, more preferably at least 90% and most preferably at least 95% homologous to a polypeptide sequence corresponding to amino acids 1-26 of SEQ ID NO. 591, a second amino acid sequence being at least 90% homologous to amino acids 13-187 of SEQ ID NO. 639, which also corresponds to amino acids 27-201 of SEQ ID NO. 591, a bridging amino acid A corresponding to amino acid 202 of SEQ ID NO. 591, a third amino acid sequence being at least 90% homologous to amino acids 189-226 of SEQ ID NO. 639, which also corresponds to amino acids 203-240 of SEQ ID NO. 591, a fourth amino acid sequence being at least 70%, optionally at least 80%, preferably at least 85%, more preferably at least 90% and most preferably at least 95% homologous to a polypeptide sequence corresponding to amino acids 241-281 of SEQ ID NO. 591, and a fifth amino acid sequence being at least 90% homologous to amino acids 227-342 of SEQ ID NO. 639, which also corresponds to amino acids 282-397 of SEQ ID NO. 591, wherein said first amino acid sequence, second amino acid sequence, bridging amino acid, third amino acid sequence, fourth amino acid sequence and fifth amino acid sequence are contiguous and in a sequential order.

[0237] According to preferred embodiments of the present invention, there is provided an isolated polypeptide encoding for a head of SEQ ID NO. 591, comprising a polypeptide being at least 70%, optionally at least about 80%, preferably at least about 85%, more preferably at least about 90% and most preferably at least about 95% homologous to amino acids 1-26 of SEQ ID NO. 591.

[0238] According to preferred embodiments of the present invention, there is provided an isolated polypeptide encoding for an edge portion of SEQ ID NO. 591, comprising an amino acid sequence being at least 70%, optionally at least about 80%, preferably at least about 85%, more preferably at least about 90% and most preferably at least about 95% homologous to the sequence encoding amino acids 241-281 corresponding to SEQ ID NO. 591.

[0239] According to preferred embodiments of the present invention, there is provided an isolated chimeric polypeptide encoding for SEQ ID NO. 591, comprising a first amino acid sequence being at least 70%, optionally at least 80%, preferably at least 85%, more preferably at least 90% and most preferably at least 95% homologous to a polypeptide sequence corresponding to amino acids 1-109 of SEQ ID NO. 591, a second amino acid sequence being at least 90% homologous to amino acids 1-131 of SEQ ID NO. 640, which also corresponds to amino acids 110-240 of SEQ ID NO. 591, a third amino acid sequence being at least 70%, optionally at least 80%, preferably at least 85%, more preferably at least 90% and most preferably at least 95% homologous to a polypeptide sequence corresponding to amino acids 241-281 of SEQ ID NO. 591, a fourth amino acid sequence being at least 90% homologous to amino acids 132-159 of SEQ ID NO. 640, which also corresponds to amino acids 282-309 of SEQ ID NO. 591, and a fifth amino acid sequence being at least 70%, optionally at least 80%, preferably at least 85%, more preferably at least 90% and most preferably at least 95% homologous to a polypeptide sequence corresponding to amino acids 310-397 of SEQ ID NO. 591, wherein said first amino acid sequence, second amino acid sequence, third amino acid sequence, fourth amino acid sequence and fifth amino acid sequence are contiguous and in a sequential order.

[0240] According to preferred embodiments of the present invention, there is provided an isolated polypeptide encoding for a head of SEQ ID NO. 591, comprising a polypeptide being at least 70%, optionally at least about 80%, preferably at least about 85%, more preferably at least about 90% and most preferably at least about 95% homologous to amino acids 1-109 of SEQ ID NO. 591.

[0241] According to preferred embodiments of the present invention, there is provided an isolated polypeptide encoding for an edge portion of SEQ ID NO. 591, comprising an amino acid sequence being at least 70%, optionally at least about 80%, preferably at least about 85%, more preferably at least about 90% and most preferably at least about 95% homologous to the sequence encoding for amino acids 241-281 corresponding to SEQ ID NO. 591.

[0242] According to preferred embodiments of the present invention, there is provided an isolated polypeptide encoding for a tail of SEQ ID NO. 591, comprising a polypeptide being at least 70%, optionally at least about 80%, preferably at least about 85%, more preferably at least about 90% and most preferably at least about 95% homologous to amino acids 310-397 in SEQ ID NO. 591.

[0243] According to preferred embodiments of the present invention, there is provided an isolated chimeric polypeptide encoding for SEQ ID NO. 591, comprising a first amino acid sequence being at least 90% homologous to amino acids 1-128 of Q96FY2 (SEQ ID NO:638), which also corresponds to amino acids 1-128 of SEQ ID NO. 591, a bridging amino acid L corresponding to amino acid 129 of SEQ ID NO. 591, a second amino acid sequence being at least 90% homologous to amino acids 130-240 of SEQ ID NO. 638, which also corresponds to amino acids 130-240 of SEQ ID NO. 591, a third amino acid sequence being at least 70%, optionally at least 80%, preferably at least 85%, more preferably at least 90% and most preferably at least 95% homologous to a polypeptide sequence corresponding to amino acids 241-281 of SEQ ID NO. 591, and a fourth amino acid sequence being at least 90% homologous to amino acids 241-356 of SEQ ID NO. 638, which also corresponds to amino acids 282-397 of SEQ ID NO. 591, wherein said first amino acid sequence, bridging amino acid, second amino acid sequence, third amino acid sequence and fourth amino acid sequence are contiguous and in a sequential order.

[0244] According to preferred embodiments of the present invention, there is provided an isolated polypeptide encoding for an edge portion of SEQ ID NO. 591, comprising an amino acid sequence being at least 70%, optionally at least about 80%, preferably at least about 85%, more preferably at least about 90% and most preferably at least about 95% homologous to the sequence encoding for amino acids 241-281 corresponding to SEQ ID NO. 591.

[0245] According to preferred embodiments of the present invention, there is provided an isolated chimeric polypeptide encoding for SEQ ID NO. 591, comprising a first amino acid sequence being at least 90% homologous to amino acids 1-240 of Q9UJZ1 (SEQ ID NO:637) which also corresponds to amino acids 1-240 of SEQ ID NO. 591, a second amino acid sequence being at least 70%, optionally at least 80%, preferably at least 85%, more preferably at least 90% and most preferably at least 95% homologous to a polypeptide sequence corresponding to amino acids 241-281 of SEQ ID NO. 591, and a third amino acid sequence being at least 90% homologous to amino acids 241-356 of Q9UJZ1 (SEQ ID NO:637), which also corresponds to amino acids 282-397 of SEQ ID NO. 591, wherein said first amino acid sequence, second amino acid sequence and third amino acid sequence are contiguous and in a sequential order.

[0246] According to preferred embodiments of the present invention, there is provided an isolated polypeptide encoding for an edge portion of SEQ ID NO. 591, comprising an amino acid sequence being at least 70%, optionally at least about 80%, preferably at least about 85%, more preferably at least about 90% and most preferably at least about 95% homologous to the sequence encoding for amino acids 241-281 corresponding to SEQ ID NO. 591.

[0247] According to preferred embodiments of the present invention, there is provided an isolated chimeric polypeptide encoding for SEQ ID NO. 592, comprising a first amino acid sequence being at least 70%, optionally at least 80%, preferably at least 85%, more preferably at least 90% and most preferably at least 95% homologous to a polypeptide sequence corresponding to amino acids 1-26 of SEQ ID NO. 592, a second amino acid sequence being at least 90% homologous to amino acids 13-187 of SEQ ID NO. 639, which also corresponds to amino acids 27-201 of SEQ ID NO. 592, a bridging amino acid A corresponding to amino acid 202 of SEQ ID NO. 592, a third amino acid sequence being at least 90% homologous to to amino acids 189-254 of SEQ ID NO. 639, which also corresponds to amino acids 203-268 of SEQ ID NO. 592, and a fourth amino acid sequence being at least 90% homologous to amino acids 298-342 of SEQ ID NO. 639, which also corresponds to amino acids 269-313 of SEQ ID NO. 592, wherein said first amino acid sequence, second amino acid sequence, bridging amino acid, third amino acid sequence and fourth amino acid sequence are contiguous and in a sequential order.

[0248] According to preferred embodiments of the present invention, there is provided an isolated polypeptide encoding for a head of SEQ ID NO. 592, comprising a polypeptide being at least 70%, optionally at least about 80%, preferably at least about 85%, more preferably at least about 90% and most preferably at least about 95% homologous to amino acids 1-26 of SEQ ID NO. 592.

[0249] According to preferred embodiments of the present invention, there is provided an isolated chimeric polypeptide encoding for an edge portion of SEQ ID NO. 592, comprising a polypeptide having a length “n”, wherein n is at least about 10 amino acids in length, optionally at least about 20 amino acids in length, preferably at least about 30 amino acids in length, more preferably at least about 40 amino acids in length and most preferably at least about 50 amino acids in length, wherein at least two amino acids comprise HA, having a structure as follows: a sequence starting from any of amino acid numbers 268−x to 268; and ending at any of amino acid numbers 269+((n−2)−x), in which x varies from 0 to n−2.

[0250] According to preferred embodiments of the present invention, there is provided an isolated chimeric polypeptide encoding for SEQ ID NO. 592, comprising a first amino acid sequence being at least 70%, optionally at least 80%, preferably at least 85%, more preferably at least 90% and most preferably at least 95% homologous to a polypeptide sequence amino acids 1-109 of SEQ ID NO. 592, a second amino acid sequence being at least 90% homologous to amino acids 1-159 of SEQ ID NO. 640, which also corresponds to amino acids 110-268 of SEQ ID NO. 592, and a third amino acid sequence being at least 70%, optionally at least 80%, preferably at least 85%, more preferably at least 90% and most preferably at least 95% homologous to a polypeptide sequence corresponding to amino acids 269-313 of SEQ ID NO. 592, wherein said first amino acid sequence, second amino acid sequence and third amino acid sequence are contiguous and in a sequential order.

[0251] According to preferred embodiments of the present invention, there is provided an isolated polypeptide encoding for a head of SEQ ID NO. 592, comprising a polypeptide being at least 70%, optionally at least about 80%, preferably at least about 85%, more preferably at least about 90% and most preferably at least about 95% homologous to amino acids 1-109 of SEQ ID NO. 592.

[0252] According to preferred embodiments of the present invention, there is provided an isolated polypeptide encoding for a tail of SEQ ID NO. 592, comprising a polypeptide being at least 70%, optionally at least about 80%, preferably at least about 85%, more preferably at least about 90% and most preferably at least about 95% homologous to amino acids 269-313 in SEQ ID NO. 592.

[0253] According to preferred embodiments of the present invention, there is provided an isolated chimeric polypeptide encoding for SEQ ID NO. 592, comprising a first amino acid sequence being at least 90% homologous to amino acids 1-128 of SEQ ID NO. 638, which also corresponds to amino acids 1-128 of SEQ ID NO. 592, a bridging amino acid L corresponding to amino acid 129 of SEQ ID NO. 592, a second amino acid sequence being at least 90% homologous to amino acids 130-268 of SEQ ID NO. 638, which also corresponds to amino acids 130-268 of SEQ ID NO. 592, and a third amino acid sequence being at least 90% homologous to amino acids 312-356 of SEQ ID NO. 638, which also corresponds to amino acids 269-313 of SEQ ID NO. 592, wherein said first amino acid sequence, bridging amino acid, second amino acid sequence and third amino acid sequence are contiguous and in a sequential order.

[0254] According to preferred embodiments of the present invention, there is provided an isolated chimeric polypeptide encoding for an edge portion of SEQ ID NO. 592, comprising a polypeptide having a length “n”, wherein n is at least about 10 amino acids in length, optionally at least about 20 amino acids in length, preferably at least about 30 amino acids in length, more preferably at least about 40 amino acids in length and most preferably at least about 50 amino acids in length, wherein at least two amino acids comprise HA, having a structure as follows: a sequence starting from any of amino acid numbers 268−x to 268; and ending at any of amino acid numbers 269+((n−2)−x), in which x varies from 0 to n−2.

[0255] According to preferred embodiments of the present invention, there is provided an isolated chimeric polypeptide encoding for SEQ ID NO. 592, comprising a first amino acid sequence being at least 90% homologous to amino acids 1-268 of Q9UJZ1 (SEQ ID NO:637), which also corresponds to amino acids 1-268 of SEQ ID NO. 592, and a second amino acid sequence being at least 90% homologous to amino acids 312-356 of Q9UJZ1 (SEQ ID NO:637), which also corresponds to amino acids 269-313 of SEQ ID NO. 592, wherein said first amino acid sequence and second amino acid sequence are contiguous and in a sequential order.

[0256] According to preferred embodiments of the present invention, there is provided an isolated chimeric polypeptide encoding for an edge portion of SEQ ID NO. 592, comprising a polypeptide having a length “n”, wherein n is at least about 10 amino acids in length, optionally at least about 20 amino acids in length, preferably at least about 30 amino acids in length, more preferably at least about 40 amino acids in length and most preferably at least about 50 amino acids in length, wherein at least two amino acids comprise HA, having a structure as follows: a sequence starting from any of amino acid numbers 268−x to 268; and ending at any of amino acid numbers 269+((n−2)−x), in which x varies from 0 to n−2.

[0257] According to preferred embodiments of the present invention, there is provided an isolated chimeric polypeptide encoding for SEQ ID NO. 592, comprising a first amino acid sequence being at least 70%, optionally at least 80%, preferably at least 85%, more preferably at least 90% and most preferably at least 95% homologous to a polypeptide sequence amino acids 1-109 of SEQ ID NO. 592, a second amino acid sequence being at least 90% homologous to amino acids 1-159 of SEQ ID NO. 640, which also corresponds to amino acids 110-268 of SEQ ID NO. 592, and a third amino acid sequence being at least 70%, optionally at least 80%, preferably at least 85%, more preferably at least 90% and most preferably at least 95% homologous to a polypeptide sequence corresponding to amino acids 269-313 of SEQ ID NO. 592, wherein said first amino acid sequence, second amino acid sequence and third amino acid sequence are contiguous and in a sequential order.

[0258] According to preferred embodiments of the present invention, there is provided an isolated polypeptide encoding for a head of SEQ ID NO. 592, comprising a polypeptide being at least 70%, optionally at least about 80%, preferably at least about 85%, more preferably at least about 90% and most preferably at least about 95% homologous to amino acids 1-109 of SEQ ID NO. 592.

[0259] According to preferred embodiments of the present invention, there is provided an isolated polypeptide encoding for a tail of SEQ ID NO. 592, comprising a polypeptide being at least 70%, optionally at least about 80%, preferably at least about 85%, more preferably at least about 90% and most preferably at least about 95% homologous to amino acids 269-313 in SEQ ID NO. 592.

[0260] According to preferred embodiments of the present invention, there is provided an isolated chimeric polypeptide encoding for SEQ ID NO. 592, comprising a first amino acid sequence being at least 90% homologous to amino acids 1-128 of SEQ ID NO. 638, which also corresponds to amino acids 1-128 of SEQ ID NO. 592, a bridging amino acid L corresponding to amino acid 129 of SEQ ID NO. 592, a second amino acid sequence being at least 90% homologous to amino acids 130-268 of SEQ ID NO. 638, which also corresponds to amino acids 130-268 of SEQ ID NO. 592, and a third amino acid sequence being at least 90% homologous to amino acids 312-356 of SEQ ID NO. 638, which also corresponds to amino acids 269-313 of SEQ ID NO. 592, wherein said first amino acid sequence, bridging amino acid, second amino acid sequence and third amino acid sequence are contiguous and in a sequential order.

[0261] According to preferred embodiments of the present invention, there is provided an isolated chimeric polypeptide encoding for an edge portion of SEQ ID NO. 592, comprising a polypeptide having a length “n”, wherein n is at least about 10 amino acids in length, optionally at least about 20 amino acids in length, preferably at least about 30 amino acids in length, more preferably at least about 40 amino acids in length and most preferably at least about 50 amino acids in length, wherein at least two amino acids comprise HA, having a structure as follows: a sequence starting from any of amino acid numbers 268−x to 268; and ending at any of amino acid numbers 269+((n−2)−x), in which x varies from 0 to n−2.

[0262] According to preferred embodiments of the present invention, there is provided an isolated chimeric polypeptide encoding for SEQ ID NO. 592, comprising a first amino acid sequence being at least 90% homologous to amino acids 1-268 of Q9UJZ1 (SEQ ID NO:637), which also corresponds to amino acids 1-268 of SEQ ID NO. 592, and a second amino acid sequence being at least 90% homologous to amino acids 312-356 of Q9UJZ1 (SEQ ID NO:637), which also corresponds to amino acids 269-313 of SEQ ID NO. 592, wherein said first amino acid sequence and second amino acid sequence are contiguous and in a sequential order.

[0263] According to preferred embodiments of the present invention, there is provided an isolated chimeric polypeptide encoding for an edge portion of SEQ ID NO. 592, comprising a polypeptide having a length “n”, wherein n is at least about 10 amino acids in length, optionally at least about 20 amino acids in length, preferably at least about 30 amino acids in length, more preferably at least about 40 amino acids in length and most preferably at least about 50 amino acids in length, wherein at least two amino acids comprise HA, having a structure as follows: a sequence starting from any of amino acid numbers 268−x to 268; and ending at any of amino acid numbers 269+((n−2)−x), in which x varies from 0 to n−2.

[0264] According to preferred embodiments of the present invention, there is provided an isolated chimeric polypeptide encoding for SEQ ID NO. 593, comprising a first amino acid sequence being at least 70%, optionally at least 80%, preferably at least 85%, more preferably at least 90% and most preferably at least 95% homologous to a polypeptide sequence corresponding to amino acids 1-26 of SEQ ID NO. 593, a second amino acid sequence being at least 90% homologous to amino acids 13-187 of SEQ ID NO. 639, which also corresponds to amino acids 27-201 of SEQ ID NO. 593, a bridging amino acid A corresponding to amino acid 202 of SEQ ID NO. 593, a third amino acid sequence being at least 90% homologous to amino acids 189-226 of SEQ ID NO. 639, which also corresponds to amino acids 203-240 of SEQ ID NO. 593, a fourth amino acid sequence being at least 70%, optionally at least 80%, preferably at least 85%, more preferably at least 90% and most preferably at least 95% homologous to a polypeptide sequence corresponding to amino acids 241-281 of SEQ ID NO. 593, a fifth amino acid sequence being at least 90% homologous to amino acids 227-254 of SEQ ID NO. 639, which also corresponds to amino acids 282-309 of SEQ ID NO. 593, and a sixth amino acid sequence being at least 70%, optionally at least 80%, preferably at least 85%, more preferably at least 90% and most preferably at least 95% homologous to a polypeptide sequence corresponding to amino acids 310-331 of SEQ ID NO. 593, wherein said first amino acid sequence, second amino acid sequence, bridging amino acid, third amino acid sequence, fourth amino acid sequence, fifth amino acid sequence and sixth amino acid sequence are contiguous and in a sequential order.

[0265] According to preferred embodiments of the present invention, there is provided an isolated polypeptide encoding for a head of SEQ ID NO. 593, comprising a polypeptide being at least 70%, optionally at least about 80%, preferably at least about 85%, more preferably at least about 90% and most preferably at least about 95% homologous to amino acids 1-26 of SEQ ID NO. 593.

[0266] According to preferred embodiments of the present invention, there is provided an isolated polypeptide encoding for an edge portion of SEQ ID NO. 593, comprising an amino acid sequence being at least 70%, optionally at least about 80%, preferably at least about 85%, more preferably at least about 90% and most preferably at least about 95% homologous to the sequence encoding for amino acids 241-281 corresponding to SEQ ID NO. 593.

[0267] According to preferred embodiments of the present invention, there is provided an isolated polypeptide encoding for a tail of SEQ ID NO. 593, comprising a polypeptide being at least 70%, optionally at least about 80%, preferably at least about 85%, more preferably at least about 90% and most preferably at least about 95% homologous to amino acids 310-331 in SEQ ID NO. 593.

[0268] According to preferred embodiments of the present invention, there is provided an isolated chimeric polypeptide encoding for SEQ ID NO. 593, comprising a first amino acid sequence being at least 70%, optionally at least 80%, preferably at least 85%, more preferably at least 90% and most preferably at least 95% homologous to a polypeptide sequence corresponding to amino acids 1-109 of SEQ ID NO. 593, a second amino acid sequence being at least 90% homologous to amino acids 1-131 of SEQ ID NO. 640, which also corresponds to amino acids 110-240 of SEQ ID NO. 593, a third amino acid sequence being at least 70%, optionally at least 80%, preferably at least 85%, more preferably at least 90% and most preferably at least 95% homologous to a polypeptide sequence corresponding to amino acids 241-281 of SEQ ID NO. 593, and a fourth amino acid sequence being at least 90% homologous to amino acids 132-181 of SEQ ID NO. 640, which also corresponds to amino acids 282-331 of SEQ ID NO. 593, wherein said first amino acid sequence, second amino acid sequence, third amino acid sequence and fourth amino acid sequence are contiguous and in a sequential order.

[0269] According to preferred embodiments of the present invention, there is provided an isolated polypeptide encoding for a head of SEQ ID NO. 593, comprising a polypeptide being at least 70%, optionally at least about 80%, preferably at least about 85%, more preferably at least about 90% and most preferably at least about 95% homologous to amino acids 1-109 of SEQ ID NO. 593.

[0270] According to preferred embodiments of the present invention, there is provided an isolated polypeptide encoding for an edge portion of SEQ ID NO. 593, comprising an amino acid sequence being at least 70%, optionally at least about 80%, preferably at least about 85%, more preferably at least about 90% and most preferably at least about 95% homologous to the sequence encoding for amino acids 241-281 corresponding to SEQ ID NO. 593.

[0271] According to preferred embodiments of the present invention, there is provided an isolated chimeric polypeptide encoding for SEQ ID NO. 593, comprising a first amino acid sequence being at least 90% homologous to amino acids 1-128 of SEQ ID NO. 638, which also corresponds to amino acids 1-128 of SEQ ID NO. 593, a bridging amino acid L corresponding to amino acid 129 of SEQ ID NO. 593, a second amino acid sequence being at least 90% homologous to amino acids 130-240 of SEQ ID NO. 638, which also corresponds to amino acids 130-240 of SEQ ID NO. 593, a third amino acid sequence being at least 70%, optionally at least 80%, preferably at least 85%, more preferably at least 90% and most preferably at least 95% homologous to a polypeptide sequence corresponding to amino acids 241-281 of SEQ ID NO. 593, a fourth amino acid sequence being at least 90% homologous to amino acids 241-268 of SEQ ID NO. 638, which also corresponds to amino acids 282-309 of SEQ ID NO. 593, and a fifth amino acid sequence being at least 70%, optionally at least 80%, preferably at least 85%, more preferably at least 90% and most preferably at least 95% homologous to a polypeptide sequence corresponding to amino acids 310-331 of SEQ ID NO. 593, wherein said first amino acid sequence, bridging amino acid, second amino acid sequence, third amino acid sequence, fourth amino acid sequence and fifth amino acid sequence are contiguous and in a sequential order.

[0272] According to preferred embodiments of the present invention, there is provided an isolated polypeptide encoding for an edge portion of SEQ ID NO. 593, comprising an amino acid sequence being at least 70%, optionally at least about 80%, preferably at least about 85%, more preferably at least about 90% and most preferably at least about 95% homologous to the sequence encoding for amino acids 241-281 corresponding to SEQ ID NO. 593.

[0273] According to preferred embodiments of the present invention, there is provided an isolated polypeptide encoding for a tail of SEQ ID NO. 593, comprising a polypeptide being at least 70%, optionally at least about 80%, preferably at least about 85%, more preferably at least about 90% and most preferably at least about 95% homologous to amino acids 310-331 in SEQ ID NO. 593.

[0274] According to preferred embodiments of the present invention, there is provided an isolated chimeric polypeptide encoding for SEQ ID NO. 593, comprising a first amino acid sequence being at least 90% homologous to amino acids 1-240 of Q9UJZ1 (SEQ ID NO:637), which also corresponds to amino acids 1-240 of SEQ ID NO. 593, a second amino acid sequence being at least 70%, optionally at least 80%, preferably at least 85%, more preferably at least 90% and most preferably at least 95% homologous to a polypeptide sequence corresponding to amino acids 241-281 of SEQ ID NO. 593, a third amino acid sequence being at least 90% homologous to amino acids 241-268 of Q9UJZ1 (SEQ ID NO:637), which also corresponds to amino acids 282-309 of SEQ ID NO. 593, and a fourth amino acid sequence being at least 70%, optionally at least 80%, preferably at least 85%, more preferably at least 90% and most preferably at least 95% homologous to a polypeptide sequence corresponding to amino acids 310-331 of SEQ ID NO. 593, wherein said first amino acid sequence, second amino acid sequence, third amino acid sequence and fourth amino acid sequence are contiguous and in a sequential order.

[0275] According to preferred embodiments of the present invention, there is provided an isolated polypeptide encoding for an edge portion of SEQ ID NO. 593, comprising an amino acid sequence being at least 70%, optionally at least about 80%, preferably at least about 85%, more preferably at least about 90% and most preferably at least about 95% homologous to the sequence encoding for amino acids 241-281 corresponding to SEQ ID NO. 593.

[0276] According to preferred embodiments of the present invention, there is provided an isolated polypeptide encoding for a tail of SEQ ID NO. 593, comprising a polypeptide being at least 70%, optionally at least about 80%, preferably at least about 85%, more preferably at least about 90% and most preferably at least about 95% homologous to amino acids 310-331 in SEQ ID NO. 593.

[0277] According to preferred embodiments of the present invention, there is provided an isolated chimeric polypeptide encoding for SEQ ID NO. 594, comprising a first amino acid sequence being at least 70%, optionally at least 80%, preferably at least 85%, more preferably at least 90% and most preferably at least 95% homologous to a polypeptide sequence corresponding to amino acids 1-26 of SEQ ID NO. 594, a second amino acid sequence being at least 90% homologous to amino acids 13-134 of SEQ ID NO. 639, which also corresponds to amino acids 27-148 of SEQ ID NO. 594, and a third amino acid sequence being at least 70%, optionally at least 80%, preferably at least 85%, more preferably at least 90% and most preferably at least 95% homologous to a polypeptide sequence corresponding to amino acids 149-183 of SEQ ID NO. 594, wherein said first amino acid sequence, second amino acid sequence and third amino acid sequence are contiguous and in a sequential order.

[0278] According to preferred embodiments of the present invention, there is provided an isolated polypeptide encoding for a head of SEQ ID NO. 594, comprising a polypeptide being at least 70%, optionally at least about 80%, preferably at least about 85%, more preferably at least about 90% and most preferably at least about 95% homologous to amino acids 1-26 of SEQ ID NO. 594.

[0279] According to preferred embodiments of the present invention, there is provided an isolated polypeptide encoding for a tail of SEQ ID NO. 594, comprising a polypeptide being at least 70%, optionally at least about 80%, preferably at least about 85%, more preferably at least about 90% and most preferably at least about 95% homologous to amino acids 149-183 in SEQ ID NO. 594.

[0280] According to preferred embodiments of the present invention, there is provided an isolated chimeric polypeptide encoding for SEQ ID NO. 594, comprising a first amino acid sequence being at least 90% homologous to amino acids 1-128 of SEQ ID NO. 638, which also corresponds to amino acids 1-128 of SEQ ID NO. 594, a bridging amino acid L corresponding to amino acid 129 of SEQ ID NO. 594, a second amino acid sequence being at least 90% homologous to amino acids 130-148 of SEQ ID NO. 638, which also corresponds to amino acids 130-148 of SEQ ID NO. 594, and a third amino acid sequence being at least 70%, optionally at least 80%, preferably at least 85%, more preferably at least 90% and most preferably at least 95% homologous to a polypeptide sequence corresponding to amino acids 149-183 of SEQ ID NO. 594, wherein said first amino acid sequence, bridging amino acid, second amino acid sequence and third amino acid sequence are contiguous and in a sequential order.

[0281] According to preferred embodiments of the present invention, there is provided an isolated polypeptide encoding for a tail of SEQ ID NO. 594, comprising a polypeptide being at least 70%, optionally at least about 80%, preferably at least about 85%, more preferably at least about 90% and most preferably at least about 95% homologous to amino acids 149-183 in SEQ ID NO. 594.

[0282] According to preferred embodiments of the present invention, there is provided an isolated chimeric polypeptide encoding for SEQ ID NO. 594, comprising a first amino acid sequence being at least 90% homologous to amino acids 1-148 of Q9UJZ1 (SEQ ID NO:637), which also corresponds to amino acids 1-148 of SEQ ID NO. 594, and a second amino acid sequence being at least 70%, optionally at least 80%, preferably at least 85%, more preferably at least 90% and most preferably at least 95% homologous to a polypeptide sequence corresponding to amino acids 149-183 of SEQ ID NO. 594, wherein said first amino acid sequence and second amino acid sequence are contiguous and in a sequential order.

[0283] According to preferred embodiments of the present invention, there is provided an isolated polypeptide encoding for a tail of SEQ ID NO. 594, comprising a polypeptide being at least 70%, optionally at least about 80%, preferably at least about 85%, more preferably at least about 90% and most preferably at least about 95% homologous to amino acids 149-183 in SEQ ID NO. 594.

[0284] According to preferred embodiments of the present invention, there is provided an isolated chimeric polypeptide encoding for SEQ ID NO. 595, comprising a first amino acid sequence being at least 70%, optionally at least 80%, preferably at least 85%, more preferably at least 90% and most preferably at least 95% homologous to a polypeptide sequence corresponding to amino acids 1-26 of SEQ ID NO. 595, a second amino acid sequence being at least 90% homologous to amino acids 13-180 of SEQ ID NO. 639, which also corresponds to amino acids 27-194 of SEQ ID NO. 595, and a third amino acid sequence being at least 70%, optionally at least 80%, preferably at least 85%, more preferably at least 90% and most preferably at least 95% homologous to a polypeptide sequence corresponding to amino acids 195-220 of SEQ ID NO. 595, wherein said first amino acid sequence, second amino acid sequence and third amino acid sequence are contiguous and in a sequential order.

[0285] According to preferred embodiments of the present invention, there is provided an isolated polypeptide encoding for a head of SEQ ID NO. 595, comprising a polypeptide being at least 70%, optionally at least about 80%, preferably at least about 85%, more preferably at least about 90% and most preferably at least about 95% homologous to amino acids 1-26 of SEQ ID NO. 595.

[0286] According to preferred embodiments of the present invention, there is provided an isolated polypeptide encoding for a tail of SEQ ID NO. 595, comprising a polypeptide being at least 70%, optionally at least about 80%, preferably at least about 85%, more preferably at least about 90% and most preferably at least about 95% homologous to amino acids 195-220 in SEQ ID NO. 595.

[0287] According to preferred embodiments of the present invention, there is provided an isolated chimeric polypeptide encoding for SEQ ID NO. 595, comprising a first amino acid sequence being at least 90% homologous to amino acids 1-128 of SEQ ID NO. 638, which also corresponds to amino acids 1-128 of SEQ ID NO. 595, a bridging amino acid L corresponding to amino acid 129 of SEQ ID NO. 595, a second amino acid sequence being at least 90% homologous to amino acids 130-194 of SEQ ID NO. 638, which also corresponds to amino acids 130-194 of SEQ ID NO. 595, and a third amino acid sequence being at least 70%, optionally at least 80%, preferably at least 85%, more preferably at least 90% and most preferably at least 95% homologous to a polypeptide sequence corresponding to amino acids 195-220 of SEQ ID NO. 595, wherein said first amino acid sequence, bridging amino acid, second amino acid sequence and third amino acid sequence are contiguous and in a sequential order.

[0288] According to preferred embodiments of the present invention, there is provided an isolated polypeptide encoding for a tail of SEQ ID NO. 595, comprising a polypeptide being at least 70%, optionally at least about 80%, preferably at least about 85%, more preferably at least about 90% and most preferably at least about 95% homologous to amino acids 195-220 in SEQ ID NO. 595.

[0289] According to preferred embodiments of the present invention, there is provided an isolated chimeric polypeptide encoding for SEQ ID NO. 595, comprising a first amino acid sequence being at least 90% homologous to amino acids 1-194 of Q9UJZ1 (SEQ ID NO:637) which also corresponds to amino acids 1-194 of SEQ ID NO. 595, and a second amino acid sequence being at least 70%, optionally at least 80%, preferably at least 85%, more preferably at least 90% and most preferably at least 95% homologous to a polypeptide sequence corresponding to amino acids 195-220 of SEQ ID NO. 595, wherein said first amino acid sequence and second amino acid sequence are contiguous and in a sequential order.

[0290] According to preferred embodiments of the present invention, there is provided an isolated polypeptide encoding for a tail of SEQ ID NO. 595, comprising a polypeptide being at least 70%, optionally at least about 80%, preferably at least about 85%, more preferably at least about 90% and most preferably at least about 95% homologous to amino acids 195-220 in SEQ ID NO. 595.

[0291] According to preferred embodiments of the present invention, there is provided an isolated chimeric polypeptide encoding for SEQ ID NO. 596, comprising a first amino acid sequence being at least 70%, optionally at least 80%, preferably at least 85%, more preferably at least 90% and most preferably at least 95% homologous to a polypeptide sequence corresponding to amino acids 1-26 of SEQ ID NO. 596, a second amino acid sequence being at least 90% homologous to amino acids 13-134 of SEQ ID NO. 639, which also corresponds to amino acids 27-148 of SEQ ID NO. 596, a third amino acid sequence being at least 90% homologous to amino acids 180-187 of SEQ ID NO. 639, which also corresponds to amino acids 149-156 of SEQ ID NO. 596, a bridging amino acid A corresponding to amino acid 157 of SEQ ID NO. 596, and a fourth amino acid sequence being at least 90% homologous to amino acids 189-342 of SEQ ID NO. 639, which also corresponds to amino acids 158-311 of SEQ ID NO. 596, wherein said first amino acid sequence, second amino acid sequence, third amino acid sequence, bridging amino acid and fourth amino acid sequence are contiguous and in a sequential order.

[0292] According to preferred embodiments of the present invention, there is provided an isolated polypeptide encoding for a head of SEQ ID NO. 596, comprising a polypeptide being at least 70%, optionally at least about 80%, preferably at least about 85%, more preferably at least about 90% and most preferably at least about 95% homologous to amino acids 1-26 of SEQ ID NO. 596.

[0293] According to preferred embodiments of the present invention, there is provided an isolated chimeric polypeptide encoding for an edge portion of SEQ ID NO. 596, comprising a polypeptide having a length “n”, wherein n is at least about 10 amino acids in length, optionally at least about 20 amino acids in length, preferably at least about 30 amino acids in length, more preferably at least about 40 amino acids in length and most preferably at least about 50 amino acids in length, wherein at least two amino acids comprise RV, having a structure as follows: a sequence starting from any of amino acid numbers 148−x to 148; and ending at any of amino acid numbers 149+((n−2)−x), in which x varies from 0 to n−2.

[0294] According to preferred embodiments of the present invention, there is provided an isolated chimeric polypeptide encoding for SEQ ID NO. 596, comprising a first amino acid sequence being at least 70%, optionally at least 80%, preferably at least 85%, more preferably at least 90% and most preferably at least 95% homologous to a polypeptide sequence corresponding to amino acids 1-109 of SEQ ID NO. 596, a second amino acid sequence being at least 90% homologous to amino acids 1-39 of SEQ ID NO. 640, which also corresponds to amino acids 110-148 of SEQ ID NO. 596, a third amino acid sequence being at least 90% homologous to amino acids 85-159 of SEQ ID NO. 640, which also corresponds to amino acids 149-223 of SEQ ID NO. 596, and a fourth amino acid sequence being at least 70%, optionally at least 80%, preferably at least 85%, more preferably at least 90% and most preferably at least 95% homologous to a polypeptide sequence corresponding to amino acids 224-311 of SEQ ID NO. 596, wherein said first amino acid sequence, second amino acid sequence, third amino acid sequence and fourth amino acid sequence are contiguous and in a sequential order.

[0295] According to preferred embodiments of the present invention, there is provided an isolated polypeptide encoding for a head of SEQ ID NO. 596, comprising a polypeptide being at least 70%, optionally at least about 80%, preferably at least about 85%, more preferably at least about 90% and most preferably at least about 95% homologous to amino acids 1-109 of SEQ ID NO. 596.

[0296] According to preferred embodiments of the present invention, there is provided an isolated chimeric polypeptide encoding for an edge portion of SEQ ID NO. 596, comprising a polypeptide having a length “n”, wherein n is at least about 10 amino acids in length, optionally at least about 20 amino acids in length, preferably at least about 30 amino acids in length, more preferably at least about 40 amino acids in length and most preferably at least about 50 amino acids in length, wherein at least two amino acids comprise RV, having a structure as follows: a sequence starting from any of amino acid numbers 148−x to 148; and ending at any of amino acid numbers 149+((n−2)−x), in which x varies from 0 to n−2.

[0297] According to preferred embodiments of the present invention, there is provided an isolated polypeptide encoding for a tail of SEQ ID NO. 596, comprising a polypeptide being at least 70%, optionally at least about 80%, preferably at least about 85%, more preferably at least about 90% and most preferably at least about 95% homologous to amino acids 224-311 in SEQ ID NO. 596.

[0298] According to preferred embodiments of the present invention, there is provided an isolated chimeric polypeptide encoding for SEQ ID NO. 596, comprising a first amino acid sequence being at least 90% homologous to amino acids 1-128 of Q96FY2 (SEQ ID NO:638), which also corresponds to amino acids 1-128 of SEQ ID NO. 596, a bridging amino acid L corresponding to amino acid 129 of SEQ ID NO. 596, a second amino acid sequence being at least 90% homologous to amino acids 130-148 of SEQ ID NO. 638, which also corresponds to amino acids 130-148 of SEQ ID NO. 596, and a third amino acid sequence being at least 90% homologous to corresponding to amino acids 194-356 of SEQ ID NO. 638, which also corresponds to amino acids 149-311 of SEQ ID NO. 596, wherein said first amino acid sequence, bridging amino acid, second amino acid sequence and third amino acid sequence are contiguous and in a sequential order.

[0299] According to preferred embodiments of the present invention, there is provided an isolated chimeric polypeptide encoding for an edge portion of SEQ ID NO. 596, comprising a polypeptide having a length “n”, wherein n is at least about 10 amino acids in length, optionally at least about 20 amino acids in length, preferably at least about 30 amino acids in length, more preferably at least about 40 amino acids in length and most preferably at least about 50 amino acids in length, wherein at least two amino acids comprise RV, having a structure as follows: a sequence starting from any of amino acid numbers 148−x to 148; and ending at any of amino acid numbers 149+((n−2)−x), in which x varies from 0 to n−2.

[0300] According to preferred embodiments of the present invention, there is provided an isolated chimeric polypeptide encoding for SEQ ID NO. 596, comprising a first amino acid sequence being at least 90% homologous to amino acids 1-148 of Q9UJZ1 (SEQ ID NO:637), which also corresponds to amino acids 1-148 of SEQ ID NO. 596, and a second amino acid sequence being at least 90% homologous to amino acids 194-356 of Q9UJZ1 (SEQ ID NO:637), which also corresponds to amino acids 149-311 of SEQ ID NO. 596, wherein said first amino acid sequence and second amino acid sequence are contiguous and in a sequential order.

[0301] According to preferred embodiments of the present invention, there is provided an isolated chimeric polypeptide encoding for an edge portion of SEQ ID NO. 596, comprising a polypeptide having a length “n”, wherein n is at least about 10 amino acids in length, optionally at least about 20 amino acids in length, preferably at least about 30 amino acids in length, more preferably at least about 40 amino acids in length and most preferably at least about 50 amino acids in length, wherein at least two amino acids comprise RV, having a structure as follows: a sequence starting from any of amino acid numbers 148−x to 148; and ending at any of amino acid numbers 149+((n−2)−x), in which x varies from 0 to n−2.

[0302] According to preferred embodiments of the present invention, there is provided an isolated chimeric polypeptide encoding for SEQ ID NO. 597, comprising a first amino acid sequence being at least 70%, optionally at least 80%, preferably at least 85%, more preferably at least 90% and most preferably at least 95% homologous to a polypeptide sequence corresponding to amino acids 1-26 of SEQ ID NO. 597, a second amino acid sequence being at least 90% homologous to amino acids 13-143 of SEQ ID NO. 639, which also corresponds to amino acids 27-157 of SEQ ID NO. 597, and a third amino acid sequence being at least 90% homologous to amino acids 295-342 of SEQ ID NO. 639, which also corresponds to amino acids 158-205 of SEQ ID NO. 597, wherein said first amino acid sequence, second amino acid sequence and third amino acid sequence are contiguous and in a sequential order.

[0303] According to preferred embodiments of the present invention, there is provided an isolated polypeptide encoding for a head of SEQ ID NO. 597, comprising a polypeptide being at least 70%, optionally at least about 80%, preferably at least about 85%, more preferably at least about 90% and most preferably at least about 95% homologous to amino acids 1-26 of SEQ ID NO. 597.

[0304] According to preferred embodiments of the present invention, there is provided an isolated chimeric polypeptide encoding for an edge portion of SEQ ID NO. 597, comprising a polypeptide having a length “n”, wherein n is at least about 10 amino acids in length, optionally at least about 20 amino acids in length, preferably at least about 30 amino acids in length, more preferably at least about 40 amino acids in length and most preferably at least about 50 amino acids in length, wherein at least two amino acids comprise IV, having a structure as follows: a sequence starting from any of amino acid numbers 157−x to 157; and ending at any of amino acid numbers 158+((n−2)−x), in which x varies from 0 to n−2.

[0305] According to preferred embodiments of the present invention, there is provided an isolated chimeric polypeptide encoding for SEQ ID NO. 597, comprising a first amino acid sequence being at least 90% homologous to amino acids 1-128 of Q96FY2 (SEQ ID NO:638), which also corresponds to amino acids 1-128 of SEQ ID NO. 597, a bridging amino acid L corresponding to amino acid 129 of SEQ ID NO. 597, a second amino acid sequence being at least 90% homologous to amino acids 130-157 of SEQ ID NO. 639, which also corresponds to amino acids 130-157 of SEQ ID NO. 597, and a third amino acid sequence being at least 90% homologous to amino acids 309-356 of ID NO. 639, which also corresponds to amino acids 158-205 of SEQ ID NO. 597, wherein said first amino acid sequence, bridging amino acid, second amino acid sequence and third amino acid sequence are contiguous and in a sequential order.

[0306] According to preferred embodiments of the present invention, there is provided an isolated chimeric polypeptide encoding for an edge portion of SEQ ID NO. 597, comprising a polypeptide having a length “n”, wherein n is at least about 10 amino acids in length, optionally at least about 20 amino acids in length, preferably at least about 30 amino acids in length, more preferably at least about 40 amino acids in length and most preferably at least about 50 amino acids in length, wherein at least two amino acids comprise IV, having a structure as follows: a sequence starting from any of amino acid numbers 157−x to 157; and ending at any of amino acid numbers 158+((n−2)−x), in which x varies from 0 to n−2.

[0307] According to preferred embodiments of the present invention, there is provided an isolated chimeric polypeptide encoding for SEQ ID NO. 597, comprising a first amino acid sequence being at least 90% homologous to amino acids 1-157 of Q9UJZ1 (SEQ ID NO:637), which also corresponds to amino acids 1-157 of SEQ ID NO. 597, and a second amino acid sequence being at least 90% homologous to amino acids 309-356 of Q9UJZ1 (SEQ ID NO:637), which also corresponds to amino acids 158-205 of SEQ ID NO. 597, wherein said first amino acid sequence and second amino acid sequence are contiguous and in a sequential order.

[0308] According to preferred embodiments of the present invention, there is provided an isolated chimeric polypeptide encoding for an edge portion of SEQ ID NO. 597, comprising a polypeptide having a length “n”, wherein n is at least about 10 amino acids in length, optionally at least about 20 amino acids in length, preferably at least about 30 amino acids in length, more preferably at least about 40 amino acids in length and most preferably at least about 50 amino acids in length, wherein at least two amino acids comprise IV, having a structure as follows: a sequence starting from any of amino acid numbers 157−x to 157; and ending at any of amino acid numbers 158+((n−2)−x), in which x varies from 0 to n−2.

[0309] According to preferred embodiments of the present invention, there is provided an isolated chimeric polypeptide encoding for SEQ ID NO. 598, comprising a first amino acid sequence being at least 70%, optionally at least 80%, preferably at least 85%, more preferably at least 90% and most preferably at least 95% homologous to a polypeptide sequence corresponding to amino acids 1-26 of SEQ ID NO. 598, a second amino acid sequence being at least 90% homologous to amino acids 13-128 of SEQ ID NO. 639, which also corresponds to amino acids 27-142 of SEQ ID NO. 598, and a third amino acid sequence being at least 70%, optionally at least 80%, preferably at least 85%, more preferably at least 90% and most preferably at least 95% homologous to a polypeptide sequence corresponding to amino acids 143-161 of SEQ ID NO. 598, wherein said first amino acid sequence, second amino acid sequence and third amino acid sequence are contiguous and in a sequential order.

[0310] According to preferred embodiments of the present invention, there is provided an isolated polypeptide encoding for a head of SEQ ID NO. 598, comprising a polypeptide being at least 70%, optionally at least about 80%, preferably at least about 85%, more preferably at least about 90% and most preferably at least about 95% homologous to amino acids 1-26 of SEQ ID NO. 598.

[0311] According to preferred embodiments of the present invention, there is provided an isolated polypeptide encoding for a tail of SEQ ID NO. 598, comprising a polypeptide being at least 70%, optionally at least about 80%, preferably at least about 85%, more preferably at least about 90% and most preferably at least about 95% homologous to amino acids 143-161 in SEQ ID NO. 598.

[0312] According to preferred embodiments of the present invention, there is provided an isolated chimeric polypeptide encoding for SEQ ID NO. 598, comprising a first amino acid sequence being at least 90% homologous to amino acids 1-128 of SEQ ID NO. 638, which also corresponds to amino acids 1-128 of SEQ ID NO. 598, a bridging amino acid L corresponding to amino acid 129 of SEQ ID NO. 598, a second amino acid sequence being at least 90% homologous to amino acids 130-142 of SEQ ID NO. 638, which also corresponds to amino acids 130-142 of SEQ ID NO. 598, and a third amino acid sequence being at least 70%, optionally at least 80%, preferably at least 85%, more preferably at least 90% and most preferably at least 95% homologous to a polypeptide sequence corresponding to amino acids 143-161 of SEQ ID NO. 598, wherein said first amino acid sequence, bridging amino acid, second amino acid sequence and third amino acid sequence are contiguous and in a sequential order.

[0313] According to preferred embodiments of the present invention, there is provided an isolated polypeptide encoding for a tail of SEQ ID NO. 598, comprising a polypeptide being at least 70%, optionally at least about 80%, preferably at least about 85%, more preferably at least about 90% and most preferably at least about 95% homologous to amino acids 143-161 in SEQ ID NO. 598.

[0314] According to preferred embodiments of the present invention, there is provided an isolated chimeric polypeptide encoding for SEQ ID NO. 598, comprising a first amino acid sequence being at least 90% homologous to amino acids 1-142 of Q9UJZ1 (SEQ ID NO:637), which also corresponds to amino acids 1-142 of SEQ ID NO. 598, and a second amino acid sequence being at least 70%, optionally at least 80%, preferably at least 85%, more preferably at least 90% and most preferably at least 95% homologous to a polypeptide sequence corresponding to amino acids 143-161 of SEQ ID NO. 598, wherein said first amino acid sequence and second amino acid sequence are contiguous and in a sequential order.

[0315] According to preferred embodiments of the present invention, there is provided an isolated polypeptide encoding for a tail of SEQ ID NO. 598, comprising a polypeptide being at least 70%, optionally at least about 80%, preferably at least about 85%, more preferably at least about 90% and most preferably at least about 95% homologous to amino acids 143-161 in SEQ ID NO. 598.

[0316] According to preferred embodiments of the present invention, there is provided an isolated chimeric polypeptide encoding for SEQ ID NO. 600, comprising a first amino acid sequence being at least 90% homologous to amino acids 1-61 of SEQ ID NO. 638, which also corresponds to amino acids 1-61 of SEQ ID NO. 600, and a second amino acid sequence being at least 70%, optionally at least 80%, preferably at least 85%, more preferably at least 90% and most preferably at least 95% homologous to a polypeptide sequence corresponding to amino acids 62-102 of SEQ ID NO. 600, wherein said first amino acid sequence and second amino acid sequence are contiguous and in a sequential order.

[0317] According to preferred embodiments of the present invention, there is provided an isolated polypeptide encoding for a tail of SEQ ID NO. 600, comprising a polypeptide being at least 70%, optionally at least about 80%, preferably at least about 85%, more preferably at least about 90% and most preferably at least about 95% homologous to the sequence amino acids 62-102 in SEQ ID NO. 600.

[0318] According to preferred embodiments of the present invention, there is provided an isolated chimeric polypeptide encoding for SEQ ID NO. 600, comprising a first amino acid sequence being at least 90% homologous to amino acids 1-61 of Q9UJZ1 (SEQ ID NO:637), which also corresponds to amino acids 1-61 of SEQ ID NO. 600, and a second amino acid sequence being at least 70%, optionally at least 80%, preferably at least 85%, more preferably at least 90% and most preferably at least 95% homologous to a polypeptide sequence corresponding to amino acids 62-102 of SEQ ID NO. 600, wherein said first amino acid sequence and second amino acid sequence are contiguous and in a sequential order.

[0319] According to preferred embodiments of the present invention, there is provided an isolated polypeptide encoding for a tail of SEQ ID NO. 600, comprising a polypeptide being at least 70%, optionally at least about 80%, preferably at least about 85%, more preferably at least about 90% and most preferably at least about 95% homologous to amino acids 62-102 in SEQ ID NO. 600.

[0320] According to preferred embodiments of the present invention, there is provided an isolated chimeric polypeptide encoding for SEQ ID NO. 601, comprising a first amino acid sequence being at least 70%, optionally at least 80%, preferably at least 85%, more preferably at least 90% and most preferably at least 95% homologous to a polypeptide sequence corresponding to amino acids 1-26 of SEQ ID NO. 601, a second amino acid sequence being at least 90% homologous to amino acids 13-47 of SEQ ID NO. 639, which also corresponds to amino acids 27-61 of SEQ ID NO. 601, and a third amino acid sequence being at least 70%, optionally at least 80%, preferably at least 85%, more preferably at least 90% and most preferably at least 95% homologous to a polypeptide sequence corresponding to amino acids 62-72 of SEQ ID NO. 601, wherein said first amino acid sequence, second amino acid sequence and third amino acid sequence are contiguous and in a sequential order.

[0321] According to preferred embodiments of the present invention, there is provided an isolated polypeptide encoding for a head of SEQ ID NO. 601, comprising a polypeptide being at least 70%, optionally at least about 80%, preferably at least about 85%, more preferably at least about 90% and most preferably at least about 95% homologous to amino acids 1-26 of SEQ ID NO. 601.

[0322] According to preferred embodiments of the present invention, there is provided an isolated polypeptide encoding for a tail of SEQ ID NO. 601, comprising a polypeptide being at least 70%, optionally at least about 80%, preferably at least about 85%, more preferably at least about 90% and most preferably at least about 95% homologous to amino acids 62-72 in SEQ ID NO. 601.

[0323] According to preferred embodiments of the present invention, there is provided an isolated chimeric polypeptide encoding for SEQ ID NO. 601, comprising a first amino acid sequence being at least 90% homologous to amino acids 1-61 of Q96FY2 (SEQ ID NO:638), which also corresponds to amino acids 1-61 of SEQ ID NO. 601, and a second amino acid sequence being at least 70%, optionally at least 80%, preferably at least 85%, more preferably at least 90% and most preferably at least 95% homologous to a polypeptide sequence corresponding to amino acids 62-72 of SEQ ID NO. 601, wherein said first amino acid sequence and second amino acid sequence are contiguous and in a sequential order.

[0324] According to preferred embodiments of the present invention, there is provided an isolated polypeptide encoding for a tail of SEQ ID NO. 601, comprising a polypeptide being at least 70%, optionally at least about 80%, preferably at least about 85%, more preferably at least about 90% and most preferably at least about 95% homologous to amino acids 62-72 in SEQ ID NO. 601.

[0325] According to preferred embodiments of the present invention, there is provided an isolated chimeric polypeptide encoding for SEQ ID NO. 601, comprising a first amino acid sequence being at least 90% homologous to amino acids 1-61 of Q9UJZ1 (SEQ ID NO:637), which also corresponds to amino acids 1-61 of SEQ ID NO. 601, and a second amino acid sequence being at least 70%, optionally at least 80%, preferably at least 85%, more preferably at least 90% and most preferably at least 95% homologous to a polypeptide sequence corresponding to amino acids 62-72 of SEQ ID NO. 601, wherein said first amino acid sequence and second amino acid sequence are contiguous and in a sequential order.

[0326] According to preferred embodiments of the present invention, there is provided an isolated polypeptide encoding for a tail of SEQ ID NO. 601, comprising a polypeptide being at least 70%, optionally at least about 80%, preferably at least about 85%, more preferably at least about 90% and most preferably at least about 95% homologous to amino acids 62-72 in SEQ ID NO. 601.

[0327] According to preferred embodiments of the present invention, there is provided an isolated chimeric polypeptide encoding for SEQ ID NO. 602, comprising a first amino acid sequence being at least 70%, optionally at least 80%, preferably at least 85%, more preferably at least 90% and most preferably at least 95% homologous to a polypeptide sequence corresponding to amino acids 1-26 of SEQ ID NO. 602, a second amino acid sequence being at least 90% homologous to amino acids 13-80 of SEQ ID NO. 639, which also corresponds to amino acids 27-94 of SEQ ID NO. 602, and a third amino acid sequence being at least 70%, optionally at least 80%, preferably at least 85%, more preferably at least 90% and most preferably at least 95% homologous to a polypeptide sequence corresponding to amino acids 95-111 of SEQ ID NO. 602, wherein said first amino acid sequence, second amino acid sequence and third amino acid sequence are contiguous and in a sequential order.

[0328] According to preferred embodiments of the present invention, there is provided an isolated polypeptide encoding for a head of SEQ ID NO. 602, comprising a polypeptide being at least 70%, optionally at least about 80%, preferably at least about 85%, more preferably at least about 90% and most preferably at least about 95% homologous to amino acids 1-26 of SEQ ID NO. 602.

[0329] According to preferred embodiments of the present invention, there is provided an isolated polypeptide encoding for a tail of SEQ ID NO. 602, comprising a polypeptide being at least 70%, optionally at least about 80%, preferably at least about 85%, more preferably at least about 90% and most preferably at least about 95% homologous to amino acids 95-111 in SEQ ID NO. 602.

[0330] According to preferred embodiments of the present invention, there is provided an isolated chimeric polypeptide encoding for SEQ ID NO. 602, comprising a first amino acid sequence being at least 90% homologous to amino acids 1-94 of SEQ ID NO. 638, which also corresponds to amino acids 1-94 of SEQ ID NO. 602, and a second amino acid sequence being at least 70%, optionally at least 80%, preferably at least 85%, more preferably at least 90% and most preferably at least 95% homologous to a polypeptide sequence corresponding to amino acids 95-111 of SEQ ID NO. 602, wherein said first amino acid sequence and second amino acid sequence are contiguous and in a sequential order.

[0331] According to preferred embodiments of the present invention, there is provided an isolated polypeptide encoding for a tail of SEQ ID NO. 602, comprising a polypeptide being at least 70%, optionally at least about 80%, preferably at least about 85%, more preferably at least about 90% and most preferably at least about 95% homologous to amino acids 95-111 in SEQ ID NO. 602.

[0332] According to preferred embodiments of the present invention, there is provided an isolated chimeric polypeptide encoding for SEQ ID NO. 602, comprising a first amino acid sequence being at least 90% homologous to amino acids 1-94 of Q9UJZ1 (SEQ ID NO:637), which also corresponds to amino acids 1-94 of SEQ ID NO. 602, and a second amino acid sequence being at least 70%, optionally at least 80%, preferably at least 85%, more preferably at least 90% and most preferably at least 95% homologous to a polypeptide sequence corresponding to amino acids 95-111 of SEQ ID NO. 602, wherein said first amino acid sequence and second amino acid sequence are contiguous and in a sequential order.

[0333] According to preferred embodiments of the present invention, there is provided an isolated polypeptide encoding for a tail of SEQ ID NO. 602, comprising a polypeptide being at least 70%, optionally at least about 80%, preferably at least about 85%, more preferably at least about 90% and most preferably at least about 95% homologous to amino acids 95-111 in SEQ ID NO. 602.

[0334] According to preferred embodiments of the present invention, there is provided an isolated chimeric polypeptide encoding for SEQ ID NO. 581, comprising a first amino acid sequence being at least 90% homologous to amino acids 1-67 of PLTP_HUMAN (SEQ ID NO:636), which also corresponds to amino acids 1-67 of SEQ ID NO. 581, and a second amino acid sequence being at least 90% homologous to amino acids 163-493 of PLTP_HUMAN (SEQ ID NO:636), which also corresponds to amino acids 68-398 of SEQ ID NO. 581, wherein said first amino acid sequence and second amino acid sequence are contiguous and in a sequential order.

[0335] According to preferred embodiments of the present invention, there is provided an isolated chimeric polypeptide encoding for an edge portion of SEQ ID NO. 581, comprising a polypeptide having a length “n”, wherein n is at least about 10 amino acids in length, optionally at least about 20 amino acids in length, preferably at least about 30 amino acids in length, more preferably at least about 40 amino acids in length and most preferably at least about 50 amino acids in length, wherein at least two amino acids comprise EK, having a structure as follows: a sequence starting from any of amino acid numbers 67−x to 67; and ending at any of amino acid numbers 68+((n−2)−x), in which x varies from 0 to n−2.

[0336] According to preferred embodiments of the present invention, there is provided an isolated chimeric polypeptide encoding for SEQ ID NO. 582, comprising a first amino acid sequence being at least 90% homologous to amino acids 1-427 of PLTP_HUMAN (SEQ ID NO:636), which also corresponds to amino acids 1-427 of SEQ ID NO. 582, and a second amino acid sequence being at least 70%, optionally at least 80%, preferably at least 85%, more preferably at least 90% and most preferably at least 95% homologous to a polypeptide sequence corresponding to amino acids 428-432 of SEQ ID NO. 582, wherein said first amino acid sequence and second amino acid sequence are contiguous and in a sequential order.

[0337] According to preferred embodiments of the present invention, there is provided an isolated polypeptide encoding for a tail of SEQ ID NO. 582, comprising a polypeptide being at least 70%, optionally at least about 80%, preferably at least about 85%, more preferably at least about 90% and most preferably at least about 95% homologous to amino acids 428-432 in SEQ ID NO. 582.

[0338] According to preferred embodiments of the present invention, there is provided an isolated chimeric polypeptide encoding for SEQ ID NO. 584, comprising a first amino acid sequence being at least 90% homologous to amino acids 1-67 of PLTP_HUMAN (SEQ ID NO:636), which also corresponds to amino acids 1-67 of SEQ ID NO. 584, and a second amino acid sequence being at least 70%, optionally at least 80%, preferably at least 85%, more preferably at least 90% and most preferably at least 95% homologous to a polypeptide sequence corresponding to amino acids 68-98 of SEQ ID NO. 584, wherein said first amino acid sequence and second amino acid sequence are contiguous and in a sequential order.

[0339] According to preferred embodiments of the present invention, there is provided an isolated polypeptide encoding for a tail of SEQ ID NO. 584, comprising a polypeptide being at least 70%, optionally at least about 80%, preferably at least about 85%, more preferably at least about 90% and most preferably at least about 95% homologous to amino acids 68-98 in SEQ ID NO. 584.

[0340] According to preferred embodiments of the present invention, there is provided an isolated chimeric polypeptide encoding for SEQ ID NO. 585, comprising a first amino acid sequence being at least 90% homologous to amino acids 1-183 of PLTP_HUMAN (SEQ ID NO:636), which also corresponds to amino acids 1-183 of SEQ ID NO. 585, and a second amino acid sequence being at least 70%, optionally at least 80%, preferably at least 85%, more preferably at least 90% and most preferably at least 95% homologous to a polypeptide sequence corresponding to amino acids 184-200 of SEQ ID NO. 585, wherein said first amino acid sequence and second amino acid sequence are contiguous and in a sequential order.

[0341] According to preferred embodiments of the present invention, there is provided an isolated polypeptide encoding for a tail of SEQ ID NO. 585, comprising a polypeptide being at least 70%, optionally at least about 80%, preferably at least about 85%, more preferably at least about 90% and most preferably at least about 95% homologous to amino acids 184-200 in SEQ ID NO. 585.

[0342] According to preferred embodiments of the present invention, there is provided an isolated chimeric polypeptide encoding for SEQ ID NO. 586, comprising a first amino acid sequence being at least 90% homologous to amino acids 1-205 of PLTP_HUMAN (SEQ ID NO:636), which also corresponds to amino acids 1-205 of SEQ ID NO. 586, and a second amino acid sequence being at least 70%, optionally at least 80%, preferably at least 85%, more preferably at least 90% and most preferably at least 95% homologous to a polypeptide sequence corresponding to amino acids 206-217 of SEQ ID NO. 586, wherein said first amino acid sequence and second amino acid sequence are contiguous and in a sequential order.

[0343] According to preferred embodiments of the present invention, there is provided an isolated polypeptide encoding for a tail of SEQ ID NO. 586, comprising a polypeptide being at least 70%, optionally at least about 80%, preferably at least about 85%, more preferably at least about 90% and most preferably at least about 95% homologous to amino acids 206-217 in SEQ ID NO. 586.

[0344] According to preferred embodiments of the present invention, there is provided an isolated chimeric polypeptide encoding for SEQ ID NO. 587, comprising a first amino acid sequence being at least 90% homologous to amino acids 1-109 of PLTP_HUMAN (SEQ ID NO:636), which also corresponds to amino acids 1-109 of SEQ ID NO. 587, a second amino acid sequence bridging amino acid sequence comprising of L, a third amino acid sequence being at least 90% homologous to amino acids 163-183 of PLTP_HUMAN (SEQ ID NO:636), which also corresponds to amino acids 111-131 of SEQ ID NO. 587, and a fourth amino acid sequence being at least 70%, optionally at least 80%, preferably at least 85%, more preferably at least 90% and most preferably at least 95% homologous to a polypeptide sequence corresponding to amino acids 132-148 of SEQ ID NO. 587, wherein said first amino acid sequence, second amino acid sequence, third amino acid sequence and fourth amino acid sequence are contiguous and in a sequential order.

[0345] According to preferred embodiments of the present invention, there is provided an isolated polypeptide encoding for an edge portion of SEQ ID NO. 587, comprising a polypeptide having a length “n”, wherein n is at least about 10 amino acids in length, optionally at least about 20 amino acids in length, preferably at least about 30 amino acids in length, more preferably at least about 40 amino acids in length and most preferably at least about 50 amino acids in length, wherein at least three amino acids comprise FLK having a structure as follows (numbering according to SEQ ID NO. 587): a sequence starting from any of amino acid numbers 109−x to 109; and ending at any of amino acid numbers 111+((n−2)−x), in which x varies from 0 to n−2.

[0346] According to preferred embodiments of the present invention, there is provided an isolated polypeptide encoding for a tail of SEQ ID NO. 587, comprising a polypeptide being at least 70%, optionally at least about 80%, preferably at least about 85%, more preferably at least about 90% and most preferably at least about 95% homologous to amino acids 132-148 in SEQ ID NO. 587.

[0347] According to preferred embodiments of the present invention, there is provided an isolated chimeric polypeptide encoding for SEQ ID NO. 576, comprising a first amino acid sequence being at least 90% homologous to amino acids 1-1056 of SEQ ID NO. 634, which also corresponds to amino acids 1-1056 of SEQ ID NO. 576, and a second amino acid sequence being at least 70%, optionally at least 80%, preferably at least 85%, more preferably at least 90% and most preferably at least 95% homologous to a polypeptide sequence corresponding to amino acids 1057-1081 of SEQ ID NO. 576, wherein said first amino acid sequence and second amino acid sequence are contiguous and in a sequential order.

[0348] According to preferred embodiments of the present invention, there is provided an isolated polypeptide encoding for a tail of SEQ ID NO. 576, comprising a polypeptide being at least 70%, optionally at least about 80%, preferably at least about 85%, more preferably at least about 90% and most preferably at least about 95% homologous to amino acids 1057-1081 in SEQ ID NO. 576.

[0349] According to preferred embodiments of the present invention, there is provided an isolated chimeric polypeptide encoding for SEQ ID NO. 577, comprising a first amino acid sequence being at least 90% homologous to amino acids 1-714 of SEQ ID NO. 634, which also corresponds to amino acids 1-714 of SEQ ID NO. 577, and a second amino acid sequence being at least 70%, optionally at least 80%, preferably at least 85%, more preferably at least 90% and most preferably at least 95% homologous to a polypeptide sequence corresponding to amino acids 715-729 of SEQ ID NO. 577, wherein said first amino acid sequence and second amino acid sequence are contiguous and in a sequential order.

[0350] According to preferred embodiments of the present invention, there is provided an isolated polypeptide encoding for a tail of SEQ ID NO. 577, comprising a polypeptide being at least 70%, optionally at least about 80%, preferably at least about 85%, more preferably at least about 90% and most preferably at least about 95% homologous to amino acids 715-729 in SEQ ID NO. 577.

[0351] According to preferred embodiments of the present invention, there is provided an isolated chimeric polypeptide encoding for SEQ ID NO. 578, comprising a first amino acid sequence being at least 90% homologous to amino acids 1-648 of SEQ ID NO. 634, which also corresponds to amino acids 1-648 of SEQ ID NO. 578, a second amino acid sequence being at least 90% homologous to amino acids 667-714 of SEQ ID NO. 634, which also corresponds to amino acids 649-696 of SEQ ID NO. 578, and a third amino acid sequence being at least 70%, optionally at least 80%, preferably at least 85%, more preferably at least 90% and most preferably at least 95% homologous to a polypeptide sequence corresponding to amino acids 697-738 of SEQ ID NO. 578, wherein said first amino acid sequence, second amino acid sequence and third amino acid sequence are contiguous and in a sequential order.

[0352] According to preferred embodiments of the present invention, there is provided an isolated chimeric polypeptide encoding for an edge portion of SEQ ID NO. 578, comprising a polypeptide having a length “n”, wherein n is at least about 10 amino acids in length, optionally at least about 20 amino acids in length, preferably at least about 30 amino acids in length, more preferably at least about 40 amino acids in length and most preferably at least about 50 amino acids in length, wherein at least two amino acids comprise AG, having a structure as follows: a sequence starting from any of amino acid numbers 648−x to 648; and ending at any of amino acid numbers 649+((n−2)−x), in which x varies from 0 to n−2.

[0353] According to preferred embodiments of the present invention, there is provided an isolated polypeptide encoding for a tail of SEQ ID NO. 578, comprising a polypeptide being at least 70%, optionally at least about 80%, preferably at least about 85%, more preferably at least about 90% and most preferably at least about 95% homologous to amino acids 697-738 in SEQ ID NO. 578.

[0354] According to preferred embodiments of the present invention, there is provided an isolated chimeric polypeptide encoding for SEQ ID NO. 579, comprising a first amino acid sequence being at least 90% homologous to amino acids 1-260 of SEQ ID NO. 634, which also corresponds to amino acids 1-260 of SEQ ID NO. 579, and a second amino acid sequence being at least 70%, optionally at least 80%, preferably at least 85%, more preferably at least 90% and most preferably at least 95% homologous to a polypeptide sequence corresponding to amino acids 261-273 of SEQ ID NO. 579, wherein said first amino acid sequence and second amino acid sequence are contiguous and in a sequential order.

[0355] According to preferred embodiments of the present invention, there is provided an isolated polypeptide encoding for a tail of SEQ ID NO. 579, comprising a polypeptide being at least 70%, optionally at least about 80%, preferably at least about 85%, more preferably at least about 90% and most preferably at least about 95% homologous to amino acids 261-273 in SEQ ID NO. 579.

[0356] According to preferred embodiments of the present invention, there is provided an isolated chimeric polypeptide encoding for SEQ ID NO. 575, comprising a first amino acid sequence being at least 90% homologous to amino acids 1-13 of GFR2_HUMAN (SEQ ID NO:632), which also corresponds to amino acids 1-13 of SEQ ID NO. 575, and a second amino acid sequence being at least 70%, optionally at least 80%, preferably at least 85%, more preferably at least 90% and most preferably at least 95% homologous to a polypeptide sequence corresponding to amino acids 14-30 of SEQ ID NO. 575, wherein said first amino acid sequence and second amino acid sequence are contiguous and in a sequential order.

[0357] According to preferred embodiments of the present invention, there is provided an isolated polypeptide encoding for a tail of SEQ ID NO. 575, comprising a polypeptide being at least 70%, optionally at least about 80%, preferably at least about 85%, more preferably at least about 90% and most preferably at least about 95% homologous to amino acids 14-30 in SEQ ID NO. 575.

[0358] According to preferred embodiments of the present invention, there is provided an isolated chimeric polypeptide encoding for SEQ ID NO. 567, comprising a first amino acid sequence being at least 90% homologous to amino acids 1-123 of SEQ ID NO. 631, which also corresponds to amino acids 1-123 of SEQ ID NO. 567, and a second amino acid sequence being at least 70%, optionally at least 80%, preferably at least 85%, more preferably at least 90% and most preferably at least 95% homologous to a polypeptide sequence corresponding to amino acids 124-156 of SEQ ID NO. 567, wherein said first amino acid sequence and second amino acid sequence are contiguous and in a sequential order.

[0359] According to preferred embodiments of the present invention, there is provided an isolated polypeptide encoding for a tail of SEQ ID NO. 567, comprising a polypeptide being at least 70%, optionally at least about 80%, preferably at least about 85%, more preferably at least about 90% and most preferably at least about 95% homologous to amino acids 124-156 in SEQ ID NO. 567.

[0360] According to preferred embodiments of the present invention, there is provided an isolated chimeric polypeptide encoding for SEQ ID NO. 567, comprising a first amino acid sequence being at least 70%, optionally at least 80%, preferably at least 85%, more preferably at least 90% and most preferably at least 95% homologous to a polypeptide sequence corresponding to amino acids 1-73 of SEQ ID NO. 567, and a second amino acid sequence being at least 90% homologous to amino acids 1799-1881 of SEQ ID NO. 629, which also corresponds to amino acids 74-156 of SEQ ID NO. 567, wherein said first amino acid sequence and second amino acid sequence are contiguous and in a sequential order.

[0361] According to preferred embodiments of the present invention, there is provided an isolated polypeptide encoding for a head of SEQ ID NO. 567, comprising a polypeptide being at least 70%, optionally at least about 80%, preferably at least about 85%, more preferably at least about 90% and most preferably at least about 95% homologous to the sequence amino acids 1-73 of SEQ ID NO. 567.

[0362] According to preferred embodiments of the present invention, there is provided an isolated chimeric polypeptide encoding for SEQ ID NO. 567, comprising a first amino acid sequence being at least 90% homologous to to amino acids 1-52 of SEQ ID NO. 630, which also corresponds to amino acids 1-52 of SEQ ID NO. 567, a bridging amino acid G corresponding to amino acid 53 of SEQ ID NO. 567, a second amino acid sequence being at least 90% homologous to amino acids 54-124 of SEQ ID NO. 630, which also corresponds to amino acids 54-124 of SEQ ID NO. 567, and a third amino acid sequence being at least 70%, optionally at least 80%, preferably at least 85%, more preferably at least 90% and most preferably at least 95% homologous to a polypeptide sequence corresponding to amino acids 125-156 of SEQ ID NO. 567, wherein said first amino acid sequence, bridging amino acid, second amino acid sequence and third amino acid sequence are contiguous and in a sequential order.

[0363] According to preferred embodiments of the present invention, there is provided an isolated polypeptide encoding for a tail of SEQ ID NO. 567, comprising a polypeptide being at least 70%, optionally at least about 80%, preferably at least about 85%, more preferably at least about 90% and most preferably at least about 95% homologous to amino acids 125-156 in SEQ ID NO. 567.

[0364] According to preferred embodiments of the present invention, there is provided an isolated chimeric polypeptide encoding for SEQ ID NO. 568, comprising a first amino acid sequence being at least 90% homologous to amino acids 1-123 of SEQ ID NO. 631, which also corresponds to amino acids 1-123 of SEQ ID NO. 568, and a second amino acid sequence being at least 70%, optionally at least 80%, preferably at least 85%, more preferably at least 90% and most preferably at least 95% homologous to a polypeptide sequence corresponding to amino acids 124-169 of SEQ ID NO. 568, wherein said first amino acid sequence and second amino acid sequence are contiguous and in a sequential order.

[0365] According to preferred embodiments of the present invention, there is provided an isolated polypeptide encoding for a tail of SEQ ID NO. 568, comprising a polypeptide being at least 70%, optionally at least about 80%, preferably at least about 85%, more preferably at least about 90% and most preferably at least about 95% homologous to amino acids 124-169 in SEQ ID NO. 568.

[0366] According to preferred embodiments of the present invention, there is provided an isolated chimeric polypeptide encoding for SEQ ID NO. 568, comprising a first amino acid sequence being at least 90% homologous to amino acids 1-52 of SEQ ID NO. 630, which also corresponds to amino acids 1-52 of SEQ ID NO. 568, a bridging amino acid G corresponding to amino acid 53 of SEQ ID NO. 568, a second amino acid sequence being at least 90% homologous to amino acids 54-122 of SEQ ID NO. 630, which also corresponds to amino acids 54-122 of SEQ ID NO. 568, a third amino acid sequence being at least 70%, optionally at least 80%, preferably at least 85%, more preferably at least 90% and most preferably at least 95% homologous to a polypeptide sequence corresponding to amino acids 123-136 of SEQ ID NO. 568, and a fourth amino acid sequence being at least 90% homologous to amino acids 123-155 of SEQ ID NO. 630, which also corresponds to amino acids 137-169 of SEQ ID NO. 568, wherein said first amino acid sequence, bridging amino acid, second amino acid sequence, third amino acid sequence and fourth amino acid sequence are contiguous and in a sequential order.

[0367] According to preferred embodiments of the present invention, there is provided an isolated polypeptide encoding for an edge portion of SEQ ID NO. 568, comprising an amino acid sequence being at least 70%, optionally at least about 80%, preferably at least about 85%, more preferably at least about 90% and most preferably at least about 95% homologous to the sequence encoding for amino acids 123-136, corresponding to SEQ ID NO. 568.

[0368] According to preferred embodiments of the present invention, there is provided an isolated chimeric polypeptide encoding for SEQ ID NO. 569, comprising a first amino acid sequence being at least 90% homologous to amino acids 1-123 of SEQ ID NO. 631, which also corresponds to amino acids 1-123 of SEQ ID NO. 569, and a second amino acid sequence being at least 70%, optionally at least 80%, preferably at least 85%, more preferably at least 90% and most preferably at least 95% homologous to a polypeptide sequence corresponding to amino acids 124-180 of SEQ ID NO. 569, wherein said first amino acid sequence and second amino acid sequence are contiguous and in a sequential order.

[0369] According to preferred embodiments of the present invention, there is provided an isolated polypeptide encoding for a tail of SEQ ID NO. 569, comprising a polypeptide being at least 70%, optionally at least about 80%, preferably at least about 85%, more preferably at least about 90% and most preferably at least about 95% homologous to the sequence amino acids 124-180 in SEQ ID NO. 569.

[0370] According to preferred embodiments of the present invention, there is provided an isolated chimeric polypeptide encoding for SEQ ID NO. 569, comprising a first amino acid sequence being at least 90% homologous to amino acids 1-52 of SEQ ID NO. 630, which also corresponds to amino acids 1-52 of SEQ ID NO. 569, a bridging amino acid G corresponding to amino acid 53 of SEQ ID NO. 569, a second amino acid sequence being at least 90% homologous to amino acids 54-123 of SEQ ID NO. 630, which also corresponds to amino acids 54-123 of SEQ ID NO. 569, a third amino acid sequence being at least 70%, optionally at least 80%, preferably at least 85%, more preferably at least 90% and most preferably at least 95% homologous to a polypeptide sequence corresponding to amino acids 124-148 of SEQ ID NO. 569, and a fourth amino acid sequence being at least 90% homologous to amino acids 124-155 of SEQ ID NO. 630, which also corresponds to amino acids 149-180 of SEQ ID NO. 569, wherein said first amino acid sequence, bridging amino acid, second amino acid sequence, third amino acid sequence and fourth amino acid sequence are contiguous and in a sequential order.

[0371] According to preferred embodiments of the present invention, there is provided an isolated polypeptide encoding for an edge portion of SEQ ID NO. 569, comprising an amino acid sequence being at least 70%, optionally at least about 80%, preferably at least about 85%, more preferably at least about 90% and most preferably at least about 95% homologous to the sequence encoding for amino acids 124-148, corresponding to SEQ ID NO. 569.

[0372] According to preferred embodiments of the present invention, there is provided an isolated chimeric polypeptide encoding for SEQ ID NO. 570, comprising a first amino acid sequence being at least 90% homologous to amino acids 1-123 of SEQ ID NO. 631, which also corresponds to amino acids 1-123 of SEQ ID NO. 570, and a second amino acid sequence being at least 70%, optionally at least 80%, preferably at least 85%, more preferably at least 90% and most preferably at least 95% homologous to a polypeptide sequence corresponding to amino acids 124-145 of SEQ ID NO. 570, wherein said first amino acid sequence and second amino acid sequence are contiguous and in a sequential order.

[0373] According to preferred embodiments of the present invention, there is provided an isolated polypeptide encoding for a tail of SEQ ID NO. 570, comprising a polypeptide being at least 70%, optionally at least about 80%, preferably at least about 85%, more preferably at least about 90% and most preferably at least about 95% homologous to amino acids 124-148 in SEQ ID NO. 570.

[0374] According to preferred embodiments of the present invention, there is provided an isolated chimeric polypeptide encoding for SEQ ID NO. 570, comprising a first amino acid sequence being at least 90% homologous to amino acids 1-52 of SEQ ID NO. 630, which also corresponds to amino acids 1-52 of SEQ ID NO. 570, a bridging amino acid G corresponding to amino acid 53 of SEQ ID NO. 570, a second amino acid sequence being at least 90% homologous to amino acids 54-124 of SEQ ID NO. 630, which also corresponds to amino acids 54-124 of SEQ ID NO. 570, and a third amino acid sequence being at least 70%, optionally at least 80%, preferably at least 85%, more preferably at least 90% and most preferably at least 95% homologous to a polypeptide sequence corresponding to amino acids 125-145 of SEQ ID NO. 570, wherein said first amino acid sequence, bridging amino acid, second amino acid sequence and third amino acid sequence are contiguous and in a sequential order.

[0375] According to preferred embodiments of the present invention, there is provided an isolated polypeptide encoding for a tail of SEQ ID NO. 570, comprising a polypeptide being at least 70%, optionally at least about 80%, preferably at least about 85%, more preferably at least about 90% and most preferably at least about 95% homologous to amino acids 125-145 in SEQ ID NO. 570.

[0376] According to preferred embodiments of the present invention, there is provided an isolated chimeric polypeptide encoding for SEQ ID NO. 571, comprising a first amino acid sequence being at least 90% homologous to amino acids 1-101 of SEQ ID NO. 631, which also corresponds to amino acids 1-101 of SEQ ID NO. 571, and a second amino acid sequence being at least 70%, optionally at least 80%, preferably at least 85%, more preferably at least 90% and most preferably at least 95% homologous to a polypeptide sequence corresponding to amino acids 102-122 of SEQ ID NO. 571, wherein said first amino acid sequence and second amino acid sequence are contiguous and in a sequential order.

[0377] According to preferred embodiments of the present invention, there is provided an isolated polypeptide encoding for a tail of SEQ ID NO. 571, comprising a polypeptide being at least 70%, optionally at least about 80%, preferably at least about 85%, more preferably at least about 90% and most preferably at least about 95% homologous to amino acids 102-122 in SEQ ID NO. 571.

[0378] According to preferred embodiments of the present invention, there is provided an isolated chimeric polypeptide encoding for SEQ ID NO. 571, comprising a first amino acid sequence being at least 90% homologous to amino acids 1-52 of SEQ ID NO. 630, which also corresponds to amino acids 1-52 of SEQ ID NO. 571, a bridging amino acid G corresponding to amino acid 53 of SEQ ID NO. 571, a second amino acid sequence being at least 90% homologous to amino acids 54-101 of SEQ ID NO. 630, which also corresponds to amino acids 54-101 of SEQ ID NO. 571, and a third amino acid sequence being at least 70%, optionally at least 80%, preferably at least 85%, more preferably at least 90% and most preferably at least 95% homologous to a polypeptide sequence corresponding to amino acids 102-122 of SEQ ID NO. 571, wherein said first amino acid sequence, bridging amino acid, second amino acid sequence and third amino acid sequence are contiguous and in a sequential order.

[0379] According to preferred embodiments of the present invention, there is provided an isolated polypeptide encoding for a tail of SEQ ID NO. 571, comprising a polypeptide being at least 70%, optionally at least about 80%, preferably at least about 85%, more preferably at least about 90% and most preferably at least about 95% homologous to amino acids 102-122 in SEQ ID NO. 571.

[0380] According to preferred embodiments of the present invention, there is provided an isolated chimeric polypeptide encoding for SEQ ID NO. 572, comprising a first amino acid sequence being at least 90% homologous to amino acids 1-62 of SEQ ID NO. 631, which also corresponds to amino acids 1-62 of SEQ ID NO. 572, a bridging amino acid P corresponding to amino acid 63 of SEQ ID NO. 572, a second amino acid sequence being at least 90% homologous to amino acids 64-123 of SEQ ID NO. 631, which also corresponds to amino acids 64-123 of SEQ ID NO. 572, and a third amino acid sequence being at least 70%, optionally at least 80%, preferably at least 85%, more preferably at least 90% and most preferably at least 95% homologous to a polypeptide sequence corresponding to amino acids 124-155 of SEQ ID NO. 572, wherein said first amino acid sequence, bridging amino acid, second amino acid sequence and third amino acid sequence are contiguous and in a sequential order.

[0381] According to preferred embodiments of the present invention, there is provided an isolated polypeptide encoding for a tail of SEQ ID NO. 572, comprising a polypeptide being at least 70%, optionally at least about 80%, preferably at least about 85%, more preferably at least about 90% and most preferably at least about 95% homologous to amino acids 124-155 in SEQ ID NO. 572.

[0382] According to preferred embodiments of the present invention, there is provided an isolated chimeric polypeptide encoding for SEQ ID NO. 572, comprising a first amino acid sequence being at least 90% homologous to amino acids 1-52 of SEQ ID NO. 630, which also corresponds to amino acids 1-52 of SEQ ID NO. 572, a bridging amino acid G corresponding to amino acid 53 of SEQ ID NO. 572, a second amino acid sequence being at least 90% homologous to LSDDEETIS corresponding to amino acids 54-62 of SEQ ID NO. 630, which also corresponds to amino acids 54-62 of SEQ ID NO. 572, a bridging amino acid P corresponding to amino acid 63 of SEQ ID NO. 572, and a third amino acid sequence being at least 90% homologous to amino acids 64-155 of SEQ ID NO. 630, which also corresponds to amino acids 64-155 of SEQ ID NO. 572, wherein said first amino acid sequence, bridging amino acid, second amino acid sequence, bridging amino acid and third amino acid sequence are contiguous and in a sequential order.

[0383] According to preferred embodiments of the present invention, there is provided an isolated chimeric polypeptide encoding for SEQ ID NO. 573 comprising a first amino acid sequence being at least 90% homologous to amino acids 1-62 of SEQ ID NO. 631 which also corresponds to amino acids 1-62 of SEQ ID NO. 573, a bridging amino acid P corresponding to amino acid 63 of SEQ ID NO. 573, a second amino acid sequence being at least 90% homologous to amino acids 64-101 of SEQ ID NO. 631, which also corresponds to amino acids 64-101 of SEQ ID NO. 573, and a third amino acid sequence being at least 70%, optionally at least 80%, preferably at least 85%, more preferably at least 90% and most preferably at least 95% homologous to a polypeptide sequence corresponding to amino acids 102-109 of SEQ ID NO. 573, wherein said first amino acid sequence, bridging amino acid, second amino acid sequence and third amino acid sequence are contiguous and in a sequential order.

[0384] According to preferred embodiments of the present invention, there is provided an isolated polypeptide encoding for a tail of SEQ ID NO. 573, comprising a polypeptide being at least 70%, optionally at least about 80%, preferably at least about 85%, more preferably at least about 90% and most preferably at least about 95% homologous to amino acids 102-109 in SEQ ID NO. 573.

[0385] According to preferred embodiments of the present invention, there is provided an isolated chimeric polypeptide encoding for SEQ ID NO. 573, comprising a first amino acid sequence being at least 90% homologous to amino acids 1-52 of SEQ ID NO. 630 which also corresponds to amino acids 1-52 of SEQ ID NO. 573, a bridging amino acid G corresponding to amino acid 53 of SEQ ID NO. 573, a second amino acid sequence being at least 90% homologous to amino acids 54-62 of SEQ ID NO. 630, which also corresponds to amino acids 54-62 of SEQ ID NO. 573, a bridging amino acid P corresponding to amino acid 63 of SEQ ID NO. 573, a third amino acid sequence being at least 90% homologous to amino acids 64-101 of SEQ ID NO. 630, which also corresponds to amino acids 64-101 of SEQ ID NO. 573, and a fourth amino acid sequence being at least 70%, optionally at least 80%, preferably at least 85%, more preferably at least 90% and most preferably at least 95% homologous to a polypeptide sequence corresponding to amino acids 102-109 of SEQ ID NO. 573, wherein said first amino acid sequence, bridging amino acid, second amino acid sequence, bridging amino acid, third amino acid sequence and fourth amino acid sequence are contiguous and in a sequential order.

[0386] According to preferred embodiments of the present invention, there is provided an isolated polypeptide encoding for a tail of SEQ ID NO. 573, comprising a polypeptide being at least 70%, optionally at least about 80%, preferably at least about 85%, more preferably at least about 90% and most preferably at least about 95% homologous to amino acids 102-109 in SEQ ID NO. 573.

[0387] According to preferred embodiments of the present invention, there is provided an isolated chimeric polypeptide encoding for SEQ ID NO. 574, comprising a first amino acid sequence being at least 90% homologous to amino acids 1-62 of SEQ ID NO. 631, which also corresponds to amino acids 1-62 of SEQ ID NO. 574, a bridging amino acid P corresponding to amino acid 63 of SEQ ID NO. 574, a second amino acid sequence being at least 90% homologous to amino acids 64-101 of SEQ ID NO. 631, which also corresponds to amino acids 64-101 of SEQ ID NO. 574, and a third amino acid sequence being at least 70%, optionally at least 80%, preferably at least 85%, more preferably at least 90% and most preferably at least 95% homologous to a polypeptide sequence corresponding to amino acids 102-133 of SEQ ID NO. 574, wherein said first amino acid sequence, bridging amino acid, second amino acid sequence and third amino acid sequence are contiguous and in a sequential order.

[0388] According to preferred embodiments of the present invention, there is provided an isolated polypeptide encoding for a tail of SEQ ID NO. 574, comprising a polypeptide being at least 70%, optionally at least about 80%, preferably at least about 85%, more preferably at least about 90% and most preferably at least about 95% homologous to amino acids 102-133 in SEQ ID NO. 574.

[0389] According to preferred embodiments of the present invention, there is provided an isolated chimeric polypeptide encoding for SEQ ID NO. 574, comprising a first amino acid sequence being at least 90% homologous to amino acids 1-52 of SEQ ID NO. 630, which also corresponds to amino acids 1-52 of SEQ ID NO. 574, a bridging amino acid G corresponding to amino acid 53 of SEQ ID NO. 574, a second amino acid sequence being at least 90% homologous to amino acids 54-62 of SEQ ID NO. 630, which also corresponds to amino acids 54-62 of SEQ ID NO. 574, a bridging amino acid P corresponding to amino acid 63 of SEQ ID NO. 574, a third amino acid sequence being at least 90% homologous to amino acids 64-101 of SEQ ID NO. 630, which also corresponds to amino acids 64-101 of SEQ ID NO. 574, and a fourth amino acid sequence being at least 90% homologous to amino acids 124-155 of SEQ ID NO. 630, which also corresponds to amino acids 102-133 of SEQ ID NO. 574, wherein said first amino acid sequence, bridging amino acid, second amino acid sequence, bridging amino acid, third amino acid sequence and fourth amino acid sequence are contiguous and in a sequential order.

[0390] According to preferred embodiments of the present invention, there is provided an isolated chimeric polypeptide encoding for an edge portion of SEQ ID NO. 574, comprising a polypeptide having a length “n”, wherein n is at least about 10 amino acids in length, optionally at least about 20 amino acids in length, preferably at least about 30 amino acids in length, more preferably at least about 40 amino acids in length and most preferably at least about 50 amino acids in length, wherein at least two amino acids comprise KV, having a structure as follows: a sequence starting from any of amino acid numbers 101−x to 101; and ending at any of amino acid numbers 102+((n−2)−x), in which x varies from 0 to n−2.

[0391] According to preferred embodiments of the present invention, there is provided an isolated chimeric polypeptide encoding for SEQ ID NO. 564, comprising a first amino acid sequence being at least 90% homologous to amino acids 1-1617 of SEQ ID NO. 627, which also corresponds to amino acids 1-1617 of SEQ ID NO. 564, and a second amino acid sequence being at least 70%, optionally at least 80%, preferably at least 85%, more preferably at least 90% and most preferably at least 95% homologous to a polypeptide sequence corresponding to amino acids 1618-1645 of SEQ ID NO. 564, wherein said first amino acid sequence and second amino acid sequence are contiguous and in a sequential order.

[0392] According to preferred embodiments of the present invention, there is provided an isolated polypeptide encoding for a tail of SEQ ID NO. 564, comprising a polypeptide being at least 70%, optionally at least about 80%, preferably at least about 85%, more preferably at least about 90% and most preferably at least about 95% homologous to amino acids 1618-1645 in SEQ ID NO. 564.

[0393] According to preferred embodiments of the present invention, there is provided an isolated chimeric polypeptide encoding for SEQ ID NO. 565, comprising a first amino acid sequence being at least 90% homologous to amino acids 1-2062 of SEQ ID NO. 627, which also corresponds to amino acids 1-2062 of SEQ ID NO. 565, and a second amino acid sequence being at least 70%, optionally at least 80%, preferably at least 85%, more preferably at least 90% and most preferably at least 95% homologous to a polypeptide sequence corresponding to amino acids 2063-2074 of SEQ ID NO. 565, wherein said first amino acid sequence and second amino acid sequence are contiguous and in a sequential order.

[0394] According to preferred embodiments of the present invention, there is provided an isolated polypeptide encoding for a tail of SEQ ID NO. 565, comprising a polypeptide being at least 70%, optionally at least about 80%, preferably at least about 85%, more preferably at least about 90% and most preferably at least about 95% homologous to amino acids 2063-2074 in SEQ ID NO. 565.

[0395] According to preferred embodiments of the present invention, there is provided an isolated chimeric polypeptide encoding for SEQ ID NO. 566, comprising a first amino acid sequence being at least 90% homologous to amino acids 1-587 of SEQ ID NO. 627, which also corresponds to amino acids 1-587 of SEQ ID NO. 566, and a second amino acid sequence being at least 70%, optionally at least 80%, preferably at least 85%, more preferably at least 90% and most preferably at least 95% homologous to a polypeptide sequence corresponding to amino acids 588-603 of SEQ ID NO. 566, wherein said first amino acid sequence and second amino acid sequence are contiguous and in a sequential order.

[0396] According to preferred embodiments of the present invention, there is provided an isolated polypeptide encoding for a tail of SEQ ID NO. 566, comprising a polypeptide being at least 70%, optionally at least about 80%, preferably at least about 85%, more preferably at least about 90% and most preferably at least about 95% homologous to amino acids 588-603 in SEQ ID NO. 566.

[0397] According to preferred embodiments of the present invention, there is provided an isolated chimeric polypeptide encoding for SEQ ID NO. 560, comprising a first amino acid sequence being at least 90% homologous to amino acids 1-131 of SEQ ID NO. 625, which also corresponds to amino acids 1-131 of SEQ ID NO. 560, and a second amino acid sequence being at least 70%, optionally at least 80%, preferably at least 85%, more preferably at least 90% and most preferably at least 95% homologous to a polypeptide sequence corresponding to amino acids 132-139 of SEQ ID NO. 560, wherein said first and second amino acid sequences are contiguous and in a sequential order.

[0398] According to preferred embodiments of the present invention, there is provided an isolated polypeptide encoding for a tail of SEQ ID NO. 560, comprising a polypeptide being at least 70%, optionally at least about 80%, preferably at least about 85%, more preferably at least about 90% and most preferably at least about 95% homologous to amino acids 132-139 in SEQ ID NO. 560.

[0399] According to preferred embodiments of the present invention, there is provided an isolated chimeric polypeptide encoding for SEQ ID NO. 561, comprising a first amino acid sequence being at least 90% homologous to amino acids 1-131 of SEQ ID NO. 625, which also corresponds to amino acids 1-131 of SEQ ID NO. 561, and a second amino acid sequence being at least 70%, optionally at least 80%, preferably at least 85%, more preferably at least 90% and most preferably at least 95% homologous to a polypeptide sequence corresponding to amino acids 132-156 of SEQ ID NO. 561, wherein said first and second amino acid sequences are contiguous and in a sequential order.

[0400] According to preferred embodiments of the present invention, there is provided an isolated polypeptide encoding for a tail of SEQ ID NO. 561, comprising a polypeptide being at least 70%, optionally at least about 80%, preferably at least about 85%, more preferably at least about 90% and most preferably at least about 95% homologous to amino acids 132-156 in SEQ ID NO. 561.

[0401] According to preferred embodiments of the present invention, there is provided an isolated chimeric polypeptide encoding for SEQ ID NO. 562, comprising a first amino acid sequence being at least 90% homologous to amino acids 1-81 of SEQ ID NO. 625, which also corresponds to amino acids 1-81 of SEQ ID NO. 562, and a second amino acid sequence being at least 70%, optionally at least 80%, preferably at least 85%, more preferably at least 90% and most preferably at least 95% homologous to a polypeptide sequence corresponding to amino acids 82-89 of SEQ ID NO. 562, wherein said first and second amino acid sequences are contiguous and in a sequential order.

[0402] According to preferred embodiments of the present invention, there is provided an isolated polypeptide encoding for a tail of SEQ ID NO. 562, comprising a polypeptide being at least 70%, optionally at least about 80%, preferably at least about 85%, more preferably at least about 90% and most preferably at least about 95% homologous to amino acids 82-89 in SEQ ID NO. 562.

[0403] According to preferred embodiments of the present invention, there is provided an isolated chimeric polypeptide encoding for SEQ ID NO. 563, comprising a first amino acid sequence being at least 90% homologous to amino acids 1-82 of SEQ ID NO. 625 which also corresponds to amino acids 1-82 of SEQ ID NO. 563.

[0404] According to preferred embodiments of the present invention, there is provided an isolated chimeric polypeptide encoding for SEQ ID NO. 552, comprising a first amino acid sequence being at least 70%, optionally at least 80%, preferably at least 85%, more preferably at least 90% and most preferably at least 95% homologous to a polypeptide sequence corresponding to amino acids 1-116 of FABH_HUMAN (SEQ ID NO:623), which also corresponds to amino acids 1-116 of SEQ ID NO. 552, and a second amino acid sequence being at least 70%, optionally at least 80%, preferably at least 85%, more preferably at least 90% and most preferably at least 95% homologous to a polypeptide sequence corresponding to amino acids 117-215 of SEQ ID NO. 552, wherein said first and second amino acid sequences are contiguous and in a sequential order.

[0405] According to preferred embodiments of the present invention, there is provided an isolated polypeptide encoding for a tail of SEQ ID NO. 552, comprising a polypeptide being at least 70%, optionally at least about 80%, preferably at least about 85%, more preferably at least about 90% and most preferably at least about 95% homologous to amino acids 117-215 in SEQ ID NO. 552.

[0406] According to preferred embodiments of the present invention, there is provided an isolated chimeric polypeptide encoding for SEQ ID NO. 552, comprising a first amino acid sequence being at least 90% homologous to amino acids 1-116 of AAP35373 (SEQ ID NO:1392), which also corresponds to amino acids 1-116 of SEQ ID NO. 552, and a second amino acid sequence being at least 70%, optionally at least 80%, preferably at least 85%, more preferably at least 90% and most preferably at least 95% homologous to a polypeptide sequence corresponding to amino acids 117-215 of SEQ ID NO. 552, wherein said first and second amino acid sequences are contiguous and in a sequential order.

[0407] According to preferred embodiments of the present invention, there is provided an isolated polypeptide encoding for a tail of SEQ ID NO. 552, comprising a polypeptide being at least 70%, optionally at least about 80%, preferably at least about 85%, more preferably at least about 90% and most preferably at least about 95% homologous to amino acids 117-215 in SEQ ID NO. 552.

[0408] According to preferred embodiments of the present invention, there is provided an isolated chimeric polypeptide encoding for SEQ ID NO. 553, comprising a first amino acid sequence being at least 70%, optionally at least 80%, preferably at least 85%, more preferably at least 90% and most preferably at least 95% homologous to a polypeptide sequence amino acids 1-116 of FABH_HUMAN (SEQ ID NO:623), which also corresponds to amino acids 1-116 of SEQ ID NO. 553, and a second amino acid sequence being at least 70%, optionally at least 80%, preferably at least 85%, more preferably at least 90% and most preferably at least 95% homologous to a polypeptide sequence corresponding to amino acids 117-178 of SEQ ID NO. 553, wherein said first and second amino acid sequences are contiguous and in a sequential order.

[0409] According to preferred embodiments of the present invention, there is provided an isolated polypeptide encoding for a tail of SEQ ID NO. 553, comprising a polypeptide being at least 70%, optionally at least about 80%, preferably at least about 85%, more preferably at least about 90% and most preferably at least about 95% homologous to amino acids 117-178 in SEQ ID NO. 553.

[0410] According to preferred embodiments of the present invention, there is provided an isolated chimeric polypeptide encoding for SEQ ID NO. 553, comprising a first amino acid sequence being at least 90% homologous to amino acids 1-116 of AAP35373 (SEQ ID NO:1392), which also corresponds to amino acids 1-116 of SEQ ID NO. 553, and a second amino acid sequence being at least 70%, optionally at least 80%, preferably at least 85%, more preferably at least 90% and most preferably at least 95% homologous to a polypeptide sequence corresponding to amino acids 117-178 of SEQ ID NO. 553, wherein said first and second amino acid sequences are contiguous and in a sequential order.

[0411] According to preferred embodiments of the present invention, there is provided an isolated polypeptide encoding for a tail of SEQ ID NO. 553, comprising a polypeptide being at least 70%, optionally at least about 80%, preferably at least about 85%, more preferably at least about 90% and most preferably at least about 95% homologous to acids 117-178 in SEQ ID NO. 553.

[0412] According to preferred embodiments of the present invention, there is provided an isolated chimeric polypeptide encoding for SEQ ID NO. 553, comprising a first amino acid sequence being at least 70%, optionally at least 80%, preferably at least 85%, more preferably at least 90% and most preferably at least 95% homologous to a polypeptide sequence corresponding to amino acids 1-116 of FABH_HUMAN (SEQ ID NO:623), which also corresponds to amino acids 1-116 of SEQ ID NO. 553, and a second amino acid sequence being at least 70%, optionally at least 80%, preferably at least 85%, more preferably at least 90% and most preferably at least 95% homologous to a polypeptide sequence corresponding to amino acids 117-178 of SEQ ID NO. 553, wherein said first and second amino acid sequences are contiguous and in a sequential order.

[0413] According to preferred embodiments of the present invention, there is provided an isolated polypeptide encoding for a tail of SEQ ID NO. 553, comprising a polypeptide being at least 70%, optionally at least about 80%, preferably at least about 85%, more preferably at least about 90% and most preferably at least about 95% homologous to amino acids 117-178 in SEQ ID NO. 553.

[0414] According to preferred embodiments of the present invention, there is provided an isolated chimeric polypeptide encoding for SEQ ID NO. 553, comprising a first amino acid sequence being at least 90% homologous to amino acids 1-116 of AAP35373 (SEQ ID NO:1392), which also corresponds to amino acids 1-116 of SEQ ID NO. 553, and a second amino acid sequence being at least 70%, optionally at least 80%, preferably at least 85%, more preferably at least 90% and most preferably at least 95% homologous to a polypeptide sequence corresponding to amino acids 117-178 of SEQ ID NO. 553, wherein said first and second amino acid sequences are contiguous and in a sequential order.

[0415] According to preferred embodiments of the present invention, there is provided an isolated polypeptide encoding for a tail of SEQ ID NO. 553, comprising a polypeptide being at least 70%, optionally at least about 80%, preferably at least about 85%, more preferably at least about 90% and most preferably at least about 95% homologous to amino acids 117-178 in SEQ ID NO. 553.

[0416] According to preferred embodiments of the present invention, there is provided an isolated chimeric polypeptide encoding for SEQ ID NO. 554, comprising a first amino acid sequence being at least 70%, optionally at least 80%, preferably at least 85%, more preferably at least 90% and most preferably at least 95% homologous to a polypeptide sequence corresponding to amino acids 1-116 of FABH_HUMAN (SEQ ID NO:623), which also corresponds to amino acids 1-116 of SEQ ID NO. 554, and a second amino acid sequence being at least 70%, optionally at least 80%, preferably at least 85%, more preferably at least 90% and most preferably at least 95% homologous to a polypeptide sequence corresponding to amino acids 117-126 of SEQ ID NO. 554, wherein said first and second amino acid sequences are contiguous and in a sequential order.

[0417] According to preferred embodiments of the present invention, there is provided an isolated polypeptide encoding for a tail of SEQ ID NO. 554, comprising a polypeptide being at least 70%, optionally at least about 80%, preferably at least about 85%, more preferably at least about 90% and most preferably at least about 95% homologous to amino acids 117-126 in SEQ ID NO. 554.

[0418] According to preferred embodiments of the present invention, there is provided an isolated chimeric polypeptide encoding for SEQ ID NO. 554, comprising a first amino acid sequence being at least 90% homologous to amino acids 1-116 of AAP35373 (SEQ ID NO:1392), which also corresponds to amino acids 1-116 of SEQ ID NO. 554, and a second amino acid sequence being at least 70%, optionally at least 80%, preferably at least 85%, more preferably at least 90% and most preferably at least 95% homologous to a polypeptide sequence corresponding to amino acids 117-126 of SEQ ID NO. 554, wherein said first and second amino acid sequences are contiguous and in a sequential order.

[0419] According to preferred embodiments of the present invention, there is provided an isolated polypeptide encoding for a tail of SEQ ID NO. 554, comprising a polypeptide being at least 70%, optionally at least about 80%, preferably at least about 85%, more preferably at least about 90% and most preferably at least about 95% homologous to amino acids 117-126 in SEQ ID NO. 554.

[0420] According to preferred embodiments of the present invention, there is provided an isolated chimeric polypeptide encoding for SEQ ID NO. 555, comprising a first amino acid sequence being at least 90% homologous to amino acids 1-24 of FABH_HUMAN (SEQ ID NO:623), which also corresponds to amino acids 1-24 of SEQ ID NO. 555, second amino acid sequence being at least 70%, optionally at least 80%, preferably at least 85%, more preferably at least 90% and most preferably at least 95% homologous to a polypeptide sequence corresponding to amino acids 25-35 of SEQ ID NO. 555, and a third amino acid sequence being at least 90% homologous to amino acids 25-133 of FABH_HUMAN (SEQ ID NO:623), which also corresponds to amino acids 36-144 of SEQ ID NO. 555, wherein said first, second, third and fourth amino acid sequences are contiguous and in a sequential order.

[0421] According to preferred embodiments of the present invention, there is provided an isolated polypeptide encoding for an edge portion of SEQ ID NO. 555, comprising an amino acid sequence being at least 70%, optionally at least about 80%, preferably at least about 85%, more preferably at least about 90% and most preferably at least about 95% homologous to the sequence encoding for amino acids 25-35 corresponding to SEQ ID NO. 555.

[0422] According to preferred embodiments of the present invention, there is provided an isolated chimeric polypeptide encoding for SEQ ID NO. 555, comprising a first amino acid sequence being at least 90% homologous to amino acids 1-24 of AAP35373 (SEQ ID NO:1392), which also corresponds to amino acids 1-24 of SEQ ID NO. 555, second amino acid sequence being at least 70%, optionally at least 80%, preferably at least 85%, more preferably at least 90% and most preferably at least 95% homologous to a polypeptide sequence corresponding to amino acids 25-35 of SEQ ID NO. 555, and a third amino acid sequence being at least 90% homologous to GVGFATRQVASMTKPTTIIEKNGDILTLKTHSTFKNTEISFKLGVEFDETTADDRKVKSI VTLDGGKLVHLQKWDGQETTLVRELIDGKLILTLTHGTAVCTRTYEKEA corresponding to amino acids 25-133 of AAP35373 (SEQ ID NO:1392), which also corresponds to amino acids 36-144 of SEQ ID NO. 555, wherein said first, second and third amino acid sequences are contiguous and in a sequential order.

[0423] According to preferred embodiments of the present invention, there is provided an isolated polypeptide encoding for an edge portion of SEQ ID NO. 555, comprising an amino acid sequence being at least 70%, optionally at least about 80%, preferably at least about 85%, more preferably at least about 90% and most preferably at least about 95% homologous to the sequence encoding for amino acids 25-35 corresponding to SEQ ID NO. 555.

[0424] According to preferred embodiments of the present invention, there is provided an isolated chimeric polypeptide encoding for SEQ ID NO. 534, comprising a first amino acid sequence being at least 90% homologous to amino acids 1-476 of EPB2_HUMAN (SEQ ID NO:616), which also corresponds to amino acids 1-476 of SEQ ID NO. 534, and a second amino acid sequence being at least 70%, optionally at least 80%, preferably at least 85%, more preferably at least 90% and most preferably at least 95% homologous to a polypeptide sequence corresponding to amino acids 477-496 of SEQ ID NO. 534, wherein said first and second amino acid sequences are contiguous and in a sequential order.

[0425] According to preferred embodiments of the present invention, there is provided an isolated polypeptide encoding for a tail of SEQ ID NO. 534, comprising a polypeptide being at least 70%, optionally at least about 80%, preferably at least about 85%, more preferably at least about 90% and most preferably at least about 95% homologous to amino acids 477-496 in SEQ ID NO. 534.

[0426] According to preferred embodiments of the present invention, there is provided an isolated chimeric polypeptide encoding for SEQ ID NO. 535, comprising a first amino acid sequence being at least 90% homologous to amino acids 1-270 of EPB2_HUMAN (SEQ ID NO:616), which also corresponds to amino acids 1-270 of SEQ ID NO. 535, and a second amino acid sequence being at least 70%, optionally at least 80%, preferably at least 85%, more preferably at least 90% and most preferably at least 95% homologous to a polypeptide sequence corresponding to amino acids 271-301 of SEQ ID NO. 535, wherein said first and second amino acid sequences are contiguous and in a sequential order.

[0427] According to preferred embodiments of the present invention, there is provided an isolated polypeptide encoding for a tail of SEQ ID NO. 535, comprising a polypeptide being at least 70%, optionally at least about 80%, preferably at least about 85%, more preferably at least about 90% and most preferably at least about 95% homologous to amino acids 271-301 in SEQ ID NO. 535.

[0428] According to preferred embodiments of the present invention, there is provided an isolated chimeric polypeptide encoding for SEQ ID NO. 536, comprising a first amino acid sequence being at least 90% homologous to amino acids 1-319 of CEA6_HUMAN (SEQ ID NO:617), which also corresponds to amino acids 1-319 of SEQ ID NO. 536, and a second amino acid sequence being at least 70%, optionally at least 80%, preferably at least 85%, more preferably at least 90% and most preferably at least 95% homologous to a polypeptide sequence corresponding to amino acids 320-324 of SEQ ID NO. 536, wherein said first and second amino acid sequences are contiguous and in a sequential order.

[0429] According to preferred embodiments of the present invention, there is provided an isolated polypeptide encoding for a tail of SEQ ID NO. 536, comprising a polypeptide being at least 70%, optionally at least about 80%, preferably at least about 85%, more preferably at least about 90% and most preferably at least about 95% homologous to amino acids 320-324 in SEQ ID NO. 536.

[0430] According to preferred embodiments of the present invention, there is provided an isolated chimeric polypeptide encoding for SEQ ID NO. 537, comprising a first amino acid sequence being at least 90% homologous to amino acids 1-234 of CEA6_HUMAN (SEQ ID NO:617), which also corresponds to amino acids 1-234 of SEQ ID NO. 537, and a second amino acid sequence being at least 70%, optionally at least 80%, preferably at least 85%, more preferably at least 90% and most preferably at least 95% homologous to a polypeptide sequence corresponding to amino acids 235-256 of SEQ ID NO. 537, wherein said first and second amino acid sequences are contiguous and in a sequential order.

[0431] According to preferred embodiments of the present invention, there is provided an isolated polypeptide encoding for a tail of SEQ ID NO. 537, comprising a polypeptide being at least 70%, optionally at least about 80%, preferably at least about 85%, more preferably at least about 90% and most preferably at least about 95% homologous to amino acids 235-256 in SEQ ID NO. 537.

[0432] According to preferred embodiments of the present invention, there is provided an isolated chimeric polypeptide encoding for SEQ ID NO. 537, comprising a first amino acid sequence being at least 90% homologous to amino acids 1-234 of Q13774 (SEQ ID NO:1382), which also corresponds to amino acids 1-234 of SEQ ID NO. 537, and a second amino acid sequence being at least 70%, optionally at least 80%, preferably at least 85%, more preferably at least 90% and most preferably at least 95% homologous to a polypeptide sequence corresponding to amino acids 235-256 of SEQ ID NO. 537, wherein said first and second amino acid sequences are contiguous and in a sequential order.

[0433] According to preferred embodiments of the present invention, there is provided an isolated polypeptide encoding for a tail of SEQ ID NO. 537, comprising a polypeptide being at least 70%, optionally at least about 80%, preferably at least about 85%, more preferably at least about 90% and most preferably at least about 95% homologous to acids 235-256 in SEQ ID NO. 537.

[0434] According to preferred embodiments of the present invention, there is provided an isolated chimeric polypeptide encoding for SEQ ID NO. 538, comprising a first amino acid sequence being at least 90% homologous to amino acids 1-320 of CEA6_HUMAN (SEQ ID NO:617), which also corresponds to amino acids 1-320 of SEQ ID NO. 538, and a second amino acid sequence being at least 70%, optionally at least 80%, preferably at least 85%, more preferably at least 90% and most preferably at least 95% homologous to a polypeptide sequence corresponding to amino acids 321-390 of SEQ ID NO. 538, wherein said first and second amino acid sequences are contiguous and in a sequential order.

[0435] According to preferred embodiments of the present invention, there is provided an isolated polypeptide encoding for a tail of SEQ ID NO. 538, comprising a polypeptide being at least 70%, optionally at least about 80%, preferably at least about 85%, more preferably at least about 90% and most preferably at least about 95% homologous to amino acids 321-390 in SEQ ID NO. 538.

[0436] According to preferred embodiments of the present invention, there is provided an isolated chimeric polypeptide encoding for SEQ ID NO. 539, comprising a first amino acid sequence being at least 90% homologous to amino acids 1-141 of CEA6_HUMAN (SEQ ID NO:617), which also corresponds to amino acids 1-141 of SEQ ID NO. 539, and a second amino acid sequence being at least 70%, optionally at least 80%, preferably at least 85%, more preferably at least 90% and most preferably at least 95% homologous to a polypeptide sequence corresponding to amino acids 142-183 of SEQ ID NO. 539, wherein said first and second amino acid sequences are contiguous and in a sequential order.

[0437] According to preferred embodiments of the present invention, there is provided an isolated polypeptide encoding for a tail of SEQ ID NO. 539, comprising a polypeptide being at least 70%, optionally at least about 80%, preferably at least about 85%, more preferably at least about 90% and most preferably at least about 95% homologous to amino acids 142-183 in SEQ ID NO. 539.

[0438] According to preferred embodiments of the present invention, there is provided an isolated chimeric polypeptide encoding for SEQ ID NO. 540, comprising a first amino acid sequence being at least 90% homologous to amino acids 1-167 of Q9HAP5 (SEQ ID NO:1384), which also corresponds to amino acids 1-167 of SEQ ID NO. 540, and a second amino acid sequence being at least 70%, optionally at least 80%, preferably at least 85%, more preferably at least 90% and most preferably at least 95% homologous to a polypeptide sequence corresponding to amino acids 168-180 of SEQ ID NO. 540, wherein said first and second amino acid sequences are contiguous and in a sequential order.

[0439] According to preferred embodiments of the present invention, there is provided an isolated polypeptide encoding for a tail of SEQ ID NO. 540, comprising a polypeptide being at least 70%, optionally at least about 80%, preferably at least about 85%, more preferably at least about 90% and most preferably at least about 95% homologous to amino acids 168-180 in SEQ ID NO. 540.

[0440] According to preferred embodiments of the present invention, there is provided an isolated chimeric polypeptide encoding for SEQ ID NO. 541, comprising a first amino acid sequence being at least 90% homologous to amino acids 1-357 of Q8N441 (SEQ ID NO:1385), which also corresponds to amino acids 1-357 of SEQ ID NO. 541, second amino acid sequence being at least 70%, optionally at least 80%, preferably at least 85%, more preferably at least 90% and most preferably at least 95% homologous to a polypeptide sequence corresponding to amino acids 358-437 of SEQ ID NO. 541, and a third amino acid sequence being at least 90% homologous to amino acids 358-504 of Q8N441 (SEQ ID NO:1385), which also corresponds to amino acids 438-584 of SEQ ID NO. 541, wherein said first, second and third amino acid sequences are contiguous and in a sequential order.

[0441] According to preferred embodiments of the present invention, there is provided an isolated polypeptide encoding for an edge portion of SEQ ID NO. 541, comprising an amino acid sequence being at least 70%, optionally at least about 80%, preferably at least about 85%, more preferably at least about 90% and most preferably at least about 95% homologous to the sequence encoding for acids 358-437 corresponding to SEQ ID NO. 541.

[0442] According to preferred embodiments of the present invention, there is provided an isolated chimeric polypeptide encoding for SEQ ID NO. 542, comprising a first amino acid sequence being at least 90% homologous to amino acids 1-269 of Q9H4D7 (SEQ ID NO:1386), which also corresponds to amino acids 1-269 of SEQ ID NO. 542, and a second amino acid sequence being at least 70%, optionally at least 80%, preferably at least 85%, more preferably at least 90% and most preferably at least 95% homologous to a polypeptide sequence corresponding to amino acids 270-490 of SEQ ID NO. 542, wherein said first and second amino acid sequences are contiguous and in a sequential order.

[0443] According to preferred embodiments of the present invention, there is provided an isolated polypeptide encoding for a tail of SEQ ID NO. 542, comprising a polypeptide being at least 70%, optionally at least about 80%, preferably at least about 85%, more preferably at least about 90% and most preferably at least about 95% homologous to amino acids 270-490 in SEQ ID NO. 542.

[0444] According to preferred embodiments of the present invention, there is provided an isolated chimeric polypeptide encoding for SEQ ID NO. 542, comprising a first amino acid sequence being at least 90% homologous to amino acids 1-269 of Q8N441 (SEQ ID NO:1385), which also corresponds to amino acids 1-269 of SEQ ID NO. 542, and a second amino acid sequence being at least 70%, optionally at least 80%, preferably at least 85%, more preferably at least 90% and most preferably at least 95% homologous to a polypeptide sequence corresponding to amino acids 270-490 of SEQ ID NO. 542, wherein said first and second amino acid sequences are contiguous and in a sequential order.

[0445] According to preferred embodiments of the present invention, there is provided an isolated polypeptide encoding for a tail of SEQ ID NO. 542, comprising a polypeptide being at least 70%, optionally at least about 80%, preferably at least about 85%, more preferably at least about 90% and most preferably at least about 95% homologous to amino acids 270-490 in SEQ ID NO. 542.

[0446] According to preferred embodiments of the present invention, there is provided an isolated chimeric polypeptide encoding for SEQ ID NO. 543, comprising a first amino acid sequence being at least 90% homologous to amino acids 1-81 of SZ05_HUMAN (SEQ ID NO:618), which also corresponds to amino acids 1-81 of SEQ ID NO. 543.

[0447] According to preferred embodiments of the present invention, there is provided an isolated chimeric polypeptide encoding for SEQ ID NO. 544, comprising a first amino acid sequence being at least 90% homologous to amino acids 1-74 of MI2B_HUMAN (SEQ ID NO:619), which also corresponds to amino acids 1-74 of SEQ ID NO. 544.

[0448] According to preferred embodiments of the present invention, there is provided an isolated chimeric polypeptide encoding for SEQ ID NO. 545, comprising a first amino acid sequence being at least 90% homologous to amino acids 1-103 of MI2B_HUMAN (SEQ ID NO:619), which also corresponds to amino acids 1-103 of SEQ ID NO. 545.

[0449] According to preferred embodiments of the present invention, there is provided an isolated chimeric polypeptide encoding for SEQ ID NO. 546, comprising a first amino acid sequence being at least 90% homologous to amino acids 1-61 of MI2B_HUMAN (SEQ ID NO:619), which also corresponds to amino acids 1-61 of SEQ ID NO. 546, and a second amino acid sequence being at least 70%, optionally at least 80%, preferably at least 85%, more preferably at least 90% and most preferably at least 95% homologous to a polypeptide sequence corresponding to amino acids 62-98 of SEQ ID NO. 546, wherein said first and second amino acid sequences are contiguous and in a sequential order.

[0450] According to preferred embodiments of the present invention, there is provided an isolated polypeptide encoding for a tail of SEQ ID NO. 546, comprising a polypeptide being at least 70%, optionally at least about 80%, preferably at least about 85%, more preferably at least about 90% and most preferably at least about 95% homologous to amino acids 62-98 in SEQ ID NO. 546.

[0451] According to preferred embodiments of the present invention, there is provided an isolated chimeric polypeptide encoding for SEQ ID NO. 547, comprising a first amino acid sequence being at least 70%, optionally at least 80%, preferably at least 85%, more preferably at least 90% and most preferably at least 95% homologous to a polypeptide sequence corresponding to amino acids 1-103 of SEQ ID NO. 547, and a second amino acid sequence being at least 90% homologous to amino acids 34-107 of MI2B_HUMAN (SEQ ID NO:619), which also corresponds to amino acids 104-177 of SEQ ID NO. 547, wherein said first and second amino acid sequences are contiguous and in a sequential order.

[0452] According to preferred embodiments of the present invention, there is provided an isolated polypeptide encoding for a head of SEQ ID NO. 547, comprising a polypeptide being at least 70%, optionally at least about 80%, preferably at least about 85%, more preferably at least about 90% and most preferably at least about 95% homologous to amino acids 1-103 of SEQ ID NO. 547.

[0453] According to preferred embodiments of the present invention, there is provided an isolated chimeric polypeptide encoding for SEQ ID NO. 548, comprising a first amino acid sequence being at least 70%, optionally at least 80%, preferably at least 85%, more preferably at least 90% and most preferably at least 95% homologous to a polypeptide sequence corresponding to amino acids 1-29 of SEQ ID NO. 548, and a second amino acid sequence being at least 90% homologous to amino acids 151-461 of DCOR_HUMAN (SEQ ID NO:620), which also corresponds to amino acids 30-340 of SEQ ID NO. 548, wherein said first and second amino acid sequences are contiguous and in a sequential order.

[0454] According to preferred embodiments of the present invention, there is provided an isolated polypeptide encoding for a head of SEQ ID NO. 548, comprising a polypeptide being at least 70%, optionally at least about 80%, preferably at least about 85%, more preferably at least about 90% and most preferably at least about 95% homologous to amino acids 1-29 of SEQ ID NO. 548.

[0455] According to preferred embodiments of the present invention, there is provided an isolated chimeric polypeptide encoding for SEQ ID NO. 548, comprising a first amino acid sequence being at least 70%, optionally at least 80%, preferably at least 85%, more preferably at least 90% and most preferably at least 95% homologous to a polypeptide sequence corresponding to amino acids 1-29 of SEQ ID NO. 548, and a second amino acid sequence being at least 90% homologous to amino acids 40-350 of AAA59968 (SEQ ID NO:1387), which also corresponds to amino acids 30-340 of SEQ ID NO. 548, wherein said first and second amino acid sequences are contiguous and in a sequential order.

[0456] According to preferred embodiments of the present invention, there is provided an isolated polypeptide encoding for a head of SEQ ID NO. 548, comprising a polypeptide being at least 70%, optionally at least about 80%, preferably at least about 85%, more preferably at least about 90% and most preferably at least about 95% homologous to amino acids 1-29 of SEQ ID NO. 548.

[0457] According to preferred embodiments of the present invention, there is provided an isolated chimeric polypeptide encoding for SEQ ID NO. 548, comprising a first amino acid sequence being at least 70%, optionally at least 80%, preferably at least 85%, more preferably at least 90% and most preferably at least 95% homologous to a polypeptide sequence corresponding to amino acids 1-29 of SEQ ID NO. 548, and a second amino acid sequence being at least 90% homologous to amino acids 86-396 of AAH14562 (SEQ ID NO:1388), which also corresponds to amino acids 30-340 of SEQ ID NO. 548, wherein said first and second amino acid sequences are contiguous and in a sequential order.

[0458] According to preferred embodiments of the present invention, there is provided an isolated polypeptide encoding for a head of SEQ ID NO. 548, comprising a polypeptide being at least 70%, optionally at least about 80%, preferably at least about 85%, more preferably at least about 90% and most preferably at least about 95% homologous to amino acids 1-29 of SEQ ID NO. 548.

[0459] According to preferred embodiments of the present invention, there is provided an isolated chimeric polypeptide encoding for SEQ ID NO. 549, comprising a first amino acid sequence being at least 70%, optionally at least 80%, preferably at least 85%, more preferably at least 90% and most preferably at least 95% homologous to a polypeptide sequence corresponding to amino acids 1-44 of SEQ ID NO. 549, second amino acid sequence being at least 90% homologous to amino acids 74-191 of Q9NWT9 (SEQ ID NO:1389), which also corresponds to amino acids 45-162 of SEQ ID NO. 549, and a third amino acid sequence being at least 70%, optionally at least 80%, preferably at least 85%, more preferably at least 90% and most preferably at least 95% homologous to a polypeptide sequence corresponding to amino acids 163-238 of SEQ ID NO. 549, wherein said first, second and third amino acid sequences are contiguous and in a sequential order.

[0460] According to preferred embodiments of the present invention, there is provided an isolated polypeptide encoding for a head of SEQ ID NO. 549, comprising a polypeptide being at least 70%, optionally at least about 80%, preferably at least about 85%, more preferably at least about 90% and most preferably at least about 95% homologous to amino acids 1-44 of SEQ ID NO. 549.

[0461] According to preferred embodiments of the present invention, there is provided an isolated polypeptide encoding for a tail of SEQ ID NO. 549, comprising a polypeptide being at least 70%, optionally at least about 80%, preferably at least about 85%, more preferably at least about 90% and most preferably at least about 95% homologous to amino acids 163-238 in SEQ ID NO. 549.

[0462] According to preferred embodiments of the present invention, there is provided an isolated chimeric polypeptide encoding for SEQ ID NO. 549, comprising a first amino acid sequence being at least 70%, optionally at least 80%, preferably at least 85%, more preferably at least 90% and most preferably at least 95% homologous to a polypeptide sequence corresponding to amino acids 1-44 of SEQ ID NO. 549, and a second amino acid sequence being at least 90% homologous to amino acids 21-214 of TESC_HUMAN (SEQ ID NO:621), which also corresponds to amino acids 45-238 of SEQ ID NO. 549, wherein said first and second amino acid sequences are contiguous and in a sequential order.

[0463] According to preferred embodiments of the present invention, there is provided an isolated polypeptide encoding for a head of SEQ ID NO. 549, comprising a polypeptide being at least 70%, optionally at least about 80%, preferably at least about 85%, more preferably at least about 90% and most preferably at least about 95% homologous to amino acids 1-44 of SEQ ID NO. 549.

[0464] According to preferred embodiments of the present invention, there is provided an isolated chimeric polypeptide encoding for SEQ ID NO. 550, comprising a first amino acid sequence being at least 70%, optionally at least 80%, preferably at least 85%, more preferably at least 90% and most preferably at least 95% homologous to a polypeptide sequence corresponding to amino acids 1-130 of SEQ ID NO. 550, and a second amino acid sequence being at least 90% homologous to amino acids 1-172 of Q96C98 (SEQ ID NO:1390), which also corresponds to amino acids 131-302 of SEQ ID NO. 550, wherein said first and second amino acid sequences are contiguous and in a sequential order.

[0465] According to preferred embodiments of the present invention, there is provided an isolated polypeptide encoding for a head of SEQ ID NO. 550, comprising a polypeptide being at least 70%, optionally at least about 80%, preferably at least about 85%, more preferably at least about 90% and most preferably at least about 95% homologous to amino acids 1-130 of SEQ ID NO. 550.

[0466] According to preferred embodiments of the present invention, there is provided an isolated chimeric polypeptide encoding for SEQ ID NO. 550, comprising a first amino acid sequence being at least 70%, optionally at least 80%, preferably at least 85%, more preferably at least 90% and most preferably at least 95% homologous to a polypeptide sequence corresponding to amino acids 1-74 of SEQ ID NO. 550, and a second amino acid sequence being at least 90% homologous to amino acids 53-280 of Q9BVA2 (SEQ ID NO:1391), which also corresponds to amino acids 75-302 of SEQ ID NO. 550, wherein said first and second amino acid sequences are contiguous and in a sequential order.

[0467] According to preferred embodiments of the present invention, there is provided an isolated polypeptide encoding for a head of SEQ ID NO. 550, comprising a polypeptide being at least 70%, optionally at least about 80%, preferably at least about 85%, more preferably at least about 90% and most preferably at least about 95% homologous to amino acids 1-74 of SEQ ID NO. 550.

[0468] According to preferred embodiments of the present invention, there is provided an isolated chimeric polypeptide encoding for SEQ ID NO. 551, comprising a first amino acid sequence being at least 70%, optionally at least 80%, preferably at least 85%, more preferably at least 90% and most preferably at least 95% homologous to a polypeptide sequence corresponding to amino acids 1-34 of SEQ ID NO. 551, and a second amino acid sequence being at least 90% homologous to corresponding to amino acids 60-172 of Q96C98 (SEQ ID NO:1390), which also corresponds to amino acids 35-147 of SEQ ID NO. 551, wherein said first and second amino acid sequences are contiguous and in a sequential order.

[0469] According to preferred embodiments of the present invention, there is provided an isolated polypeptide encoding for a head of SEQ ID NO. 551 comprising a polypeptide being at least 70%, optionally at least about 80%, preferably at least about 85%, more preferably at least about 90% and most preferably at least about 95% homologous to amino acids 1-34 of SEQ ID NO. 551.

[0470] According to preferred embodiments of the present invention, there is provided an isolated chimeric polypeptide encoding for SEQ ID NO. 551, comprising a first amino acid sequence being at least 70%, optionally at least 80%, preferably at least 85%, more preferably at least 90% and most preferably at least 95% homologous to a polypeptide sequence corresponding to amino acids 1-34 of SEQ ID NO. 551, and a second amino acid sequence being at least 90% homologous to corresponding to amino acids 168-280 of Q9BVA2 (SEQ ID NO:1391), which also corresponds to amino acids 35-147 of SEQ ID NO. 551, wherein said first and second amino acid sequences are contiguous and in a sequential order.

[0471] According to preferred embodiments of the present invention, there is provided an isolated polypeptide encoding for a head of SEQ ID NO. 551, comprising a polypeptide being at least 70%, optionally at least about 80%, preferably at least about 85%, more preferably at least about 90% and most preferably at least about 95% homologous to amino acids 1-34 of SEQ ID NO. 551.

[0472] According to preferred embodiments of the present invention, there is provided an isolated polypeptide encoding for a head of SEQ ID NO. 548, comprising a polypeptide being at least 70%, optionally at least about 80%, preferably at least about 85%, more preferably at least about 90% and most preferably at least about 95% homologous to amino acids 1-29 of SEQ ID NO. 548.

[0473] According to preferred embodiments of the present invention, there is provided an isolated chimeric polypeptide encoding for SEQ ID NO. 556, comprising a first amino acid sequence being at least 90% homologous to amino acids 1-441 of SMO2_HUMAN (SEQ ID NO:624), which also corresponds to amino acids 1-441 of SEQ ID NO. 556, and a second amino acid sequence being at least 70%, optionally at least 80%, preferably at least 85%, more preferably at least 90% and most preferably at least 95% homologous to a polypeptide sequence corresponding to amino acids 442-464 of SEQ ID NO. 556, wherein said first and second amino acid sequences are contiguous and in a sequential order.

[0474] According to preferred embodiments of the present invention, there is provided an An isolated polypeptide encoding for a tail of SEQ ID NO. 556, comprising a polypeptide being at least 70%, optionally at least about 80%, preferably at least about 85%, more preferably at least about 90% and most preferably at least about 95% homologous to amino acids 442-464 in SEQ ID NO. 556.

[0475] According to preferred embodiments of the present invention, there is provided an isolated chimeric polypeptide encoding for SEQ ID NO. 557, comprising a first amino acid sequence being at least 90% homologous to amino acids 1-428 of SMO2_HUMAN (SEQ ID NO:624), which also corresponds to amino acids 1-428 of SEQ ID NO. 557, and a second amino acid sequence being at least 70%, optionally at least 80%, preferably at least 85%, more preferably at least 90% and most preferably at least 95% homologous to a polypeptide sequence corresponding to amino acids 429-434 of SEQ ID NO. 557, wherein said first and second amino acid sequences are contiguous and in a sequential order.

[0476] According to preferred embodiments of the present invention, there is provided an isolated polypeptide encoding for a tail of SEQ ID NO. 557, comprising a polypeptide being at least 70%, optionally at least about 80%, preferably at least about 85%, more preferably at least about 90% and most preferably at least about 95% homologous to amino acids 429-434 in SEQ ID NO. 557.

[0477] According to preferred embodiments of the present invention, there is provided an isolated chimeric polypeptide encoding for SEQ ID NO. 558, comprising a first amino acid sequence being at least 90% homologous to amino acids 1-441 of SMO2_HUMAN (SEQ ID NO:624), which also corresponds to amino acids 1-441 of SEQ ID NO. 558, and a second amino acid sequence being at least 70%, optionally at least 80%, preferably at least 85%, more preferably at least 90% and most preferably at least 95% homologous to a polypeptide sequence corresponding to amino acids 442-454 of SEQ ID NO. 558, wherein said first and second amino acid sequences are contiguous and in a sequential order.

[0478] According to preferred embodiments of the present invention, there is provided an isolated polypeptide encoding for a tail of SEQ ID NO. 558, comprising a polypeptide being at least 70%, optionally at least about 80%, preferably at least about 85%, more preferably at least about 90% and most preferably at least about 95% homologous amino acids 442-454 in SEQ ID NO. 558.

[0479] According to preferred embodiments of the present invention, there is provided an isolated chimeric polypeptide encoding for SEQ ID NO. 559, comprising a first amino acid sequence being at least 90% homologous to amino acids 1-170 of SMO2_HUMAN (SEQ ID NO:624), which also corresponds to amino acids 1-170 of SEQ ID NO. 559, and a second amino acid sequence being at least 90% homologous to amino acids 188-446 of SMO2_HUMAN (SEQ ID NO:624), which also corresponds to amino acids 171-429 of SEQ ID NO. 559, wherein said first and second amino acid sequences are contiguous and in a sequential order.

[0480] According to preferred embodiments of the present invention, there is provided an isolated chimeric polypeptide encoding for an edge portion of SEQ ID NO. 559, comprising a polypeptide having a length “n”, wherein n is at least about 10 amino acids in length, optionally at least about 20 amino acids in length, preferably at least about 30 amino acids in length, more preferably at least about 40 amino acids in length and most preferably at least about 50 amino acids in length, wherein at least two amino acids comprise TD, having a structure as follows: a sequence starting from any of amino acid numbers 170−x to 170; and ending at any of amino acid numbers 171+((n−2)−x), in which x varies from 0 to n−2.

[0481] According to preferred embodiments of the present invention, there is provided an antibody capable of specifically binding to an epitope of an amino acid sequence from clusters of M85491, T10888, H14624, H53626, HSENA78, HUMGROG5, HUMODCA, R00299, Z19178, S67314, Z44808, Z25299, HUMF5A, HUMANK, Z39818, HUMCA1XIA, HSS100PCB, HUMPHOSLIP, D11853, R11723, M77903 and HSKITCR. Optionally said amino acid sequence corresponds to a bridge, edge portion, tail, head or insertion.

[0482] Optionally the antibody is capable of differentiating between a splice variant having said epitope and a corresponding known protein.

[0483] According to preferred embodiments of the present invention, there is provided a kit for detecting colon cancer, comprising a kit detecting overexpression of a splice variant from clusters of M85491, T10888, H14624, H53626, HSENA78, HUMGROG5, HUMODCA, R00299, Z19178, S67314, Z44808, Z25299, HUMF5A, HUMANK, Z39818, HUMCA1XIA, HSS100PCB, HUMPHOSLIP, D11853, R11723, M77903 and HSKITCR.

[0484] Optionally the kit comprises a NAT-based technology.

[0485] Optionally the kit further comprises at least one primer pair capable of selectively hybridizing to a nucleic acid sequence.

[0486] Optionally the kit further comprises at least one oligonucleotide capable of selectively hybridizing to a nucleic acid sequence.

[0487] Optionally the kit comprises an antibody.

[0488] Optionally the kit further comprises at least one reagent for performing an ELISA or a Western blot.

[0489] According to preferred embodiments of the present invention, there is provided an method for detecting colon cancer, comprising detecting overexpression of a splice variant from clusters of M85491, T10888, H14624, H53626, HSENA78, HUMGROG5, HUMODCA, R00299, Z19178, S67314, Z44808, Z25299, HUMF5A, HUMANK, Z39818, HUMCA1XIA, HSS100PCB, HUMPHOSLIP, D11853, R11723, M77903 and HSKITCR.

[0490] Optionally detecting overexpression is performed with a NAT-based technology.

[0491] Optionally said detecting overexpression is performed with an immunoassay.

[0492] Optionally the immunoassay comprises an antibody.

[0493] According to preferred embodiments of the present invention, there is provided a biomarker capable of detecting colon cancer, comprising nucleic acid sequences or a fragment thereof, or amino acid sequences or a fragment thereof from clusters of M85491, T10888, H14624, H53626, HSENA78, HUMGROG5, HUMODCA, R00299, Z19178, S67314, Z44808, Z25299, HUMF5A, HUMANK, Z39818, HUMCA1XIA, HSS100PCB, HUMPHOSLIP, D11853, R11723, M77903 and HSKITCR.

[0494] According to preferred embodiments of the present invention, there is provided a method for screening for colon cancer, comprising detecting colon cancer cells with a biomarker or an antibody or a method or assay.

[0495] According to preferred embodiments of the present invention, there is provided a method for diagnosing colon cancer, comprising detecting colon cancer cells with a biomarker or an antibody or a method or assay.

[0496] According to preferred embodiments of the present invention, there is provided a method for monitoring disease progression of colon cancer, comprising detecting colon cancer cells with a biomarker or an antibody or a method or assay.

[0497] According to preferred embodiments of the present invention, there is provided a method of selecting a therapy for colon cancer, comprising detecting colon cancer cells with a biomarker or an antibody or a method or assay and selecting a therapy according to said detection.

[0498] According to preferred embodiments of the present invention, there is provided an isolated polynucleotide comprising a nucleic acid sequence in the table below and/or:

[0499] a nucleic acid sequence comprising a sequence selected from the table below:

[0500] According to preferred embodiments of the present invention, there is provided an isolated polypeptide comprising an amino acid sequence in the table below

[0501] According to preferred embodiments of the present invention, there is provided an isolated polynucleotide comprising a nucleic acid sequence in the table below and/or:

[0502] a nucleic acid sequence comprising a sequence in the table below:

[0503] According to preferred embodiments of the present invention, there is provided an isolated polypeptide comprising an amino acid sequence in the table below:

[0504] According to preferred embodiments of the present invention, there is provided an isolated polynucleotide comprising a nucleic acid sequence in the table below and/or:

[0505] a nucleic acid sequence comprising a sequence in the table below:

[0506] According to preferred embodiments of the present invention, there is provided an isolated polypeptide comprising an amino acid sequence in the table below:

[0507] According to preferred embodiments of the present invention, there is provided an isolated polynucleotide comprising a nucleic acid sequence in the table below and/or:

[0508] a nucleic acid sequence comprising a sequence in the table below:

[0509] According to preferred embodiments of the present invention, there is provided an isolated polypeptide comprising an amino acid sequence in the table below

[0510] According to preferred embodiments of the present invention, there is provided an isolated polynucleotide comprising a nucleic acid sequence in the table below and/or:

[0511] a nucleic acid sequence comprising a sequence in the table below:

[0512] According to preferred embodiments of the present invention, there is provided an isolated polypeptide comprising an amino acid sequence in the table below:

[0513] According to preferred embodiments of the present invention, there is provided an isolated polynucleotide comprising a nucleic acid sequence in the table below and/or:

[0514] a nucleic acid sequence comprising a sequence in the table below:

[0515] According to preferred embodiments of the present invention, there is provided an isolated polypeptide comprising an amino acid sequence in the table below

[0516] According to preferred embodiments of the present invention, there is provided an isolated polynucleotide comprising a nucleic acid sequence in the table below and/or:

[0517] a nucleic acid sequence comprising a sequence in the table below:

[0518] According to preferred embodiments of the present invention, there is provided an isolated polypeptide comprising an amino acid sequence in the table below:

[0519] According to preferred embodiments of the present invention, there is provided an isolated polynucleotide comprising a nucleic acid sequence in the table below and/or:

[0520] a nucleic acid sequence comprising a sequence in the table below:

[0521] According to preferred embodiments of the present invention, there is provided an isolated polypeptide comprising an amino acid sequence in the table below:

[0522] According to preferred embodiments of the present invention, there is provided an isolated polynucleotide comprising a nucleic acid sequence in the table below and/or:

[0523] a nucleic acid sequence comprising a sequence in the table below:

[0524] According to preferred embodiments of the present invention, there is provided an isolated polypeptide comprising an amino acid sequence in the table below

[0525] According to preferred embodiments of the present invention, there is provided an isolated polynucleotide comprising a nucleic acid sequence in the table below and/or:

[0526] a nucleic acid sequence comprising a sequence in the table below:

[0527] According to preferred embodiments of the present invention, there is provided an isolated polypeptide comprising an amino acid sequence in the table below:

[0528] According to preferred embodiments of the present invention, there is provided an isolated chimeric polypeptide encoding for HSHCGI_PEA_{—}3_P17 (SEQ ID NO:1243), comprising a first amino acid sequence being at least 90% homologous to MASGQFVNKLQEEVICPICLDILQKPVTIDCGHNFCPQCITQIGETSCGFFKCPLCKTSVR RDAIRFNSLLRNLVEKIQALQASEVQSKRKEATCPRHQEMFHYFCEDDGKFLCFVCRES KDHKSHNVSLIEEAAQNYQGQIQEQIQVLQQKEKETVQVKAQGVHRVDVFTDQVEHE KQRILTEFELLHQVLEEEKNFLLSRIYWLGHEGTEAGKHYV corresponding to amino acids 1-218 of TM31_HUMAN (SEQ ID NO:1242), which also corresponds to amino acids 1-218 of HSHCGI_PEA_{—}3_P17 (SEQ ID NO:1243), and a second amino acid sequence being at least 70%, optionally at least 80%, preferably at least 85%, more preferably at least 90% and most preferably at least 95% homologous to a polypeptide having the sequence EIPLMPTVERSQEARCYP (SEQ ID NO:1442) corresponding to amino acids 219-236 of HSHCGI_PEA_{—}3_P17 (SEQ ID NO:1243), wherein said first amino acid sequence and second amino acid sequence are contiguous and in a sequential order.

[0529] According to preferred embodiments of the present invention, there is provided an isolated polypeptide encoding for a tail of HSHCGI_PEA_{—}3_P17 (SEQ ID NO:1243), comprising a polypeptide being at least 70%, optionally at least about 80%, preferably at least about 85%, more preferably at least about 90% and most preferably at least about 95% homologous to the sequence EIPLMPTVERSQEARCYP (SEQ ID NO:1442) in HSHCGI_PEA_{—}3_P17 (SEQ ID NO:1243).

[0530] According to preferred embodiments of the present invention, there is provided an isolated chimeric polypeptide encoding for HSHCGI_PEA_{—}3_P19 (SEQ ID NO:1245), comprising a first amino acid sequence being at least 90% homologous to MASGQFVNKLQEEVICPICLDILQKPVTIDCGHNFCLKCITQIGETSCGFFKCPLCKTSVR RDAIRFNSLLRNLVEKIQALQASEVQSKRKEATCPRHQEMFHYFCEDDGKFLCFVCRES KDHKSHNVSLIEEAAQNYQGQIQEQIQVLQQKEKETVQVKAQGVHRVDVFTDQVEHE KQRILTEFELLHQVLEEEKNFLLSRIYWLGHEGTEAGKHYVASTEPQLNDLKKLVDSLK TKQNMPPRQLLE corresponding to amino acids 1-248 of TM31_HUMAN (SEQ ID NO:1242)_V2 (SEQ ID NO:1241), which also corresponds to amino acids 1-248 of HSHCGI_PEA_{—}3_P19 (SEQ ID NO:1245), and a second amino acid sequence being at least 70%, optionally at least 80%, preferably at least 85%, more preferably at least 90% and most preferably at least 95% homologous to a polypeptide having the sequence NWRKNSVKQNQDTTPSQGA (SEQ ID NO:1443) corresponding to amino acids 249-267 of HSHCGI_PEA_{—}3_P19 (SEQ ID NO:1245), wherein said first amino acid sequence and second amino acid sequence are contiguous and in a sequential order.

[0531] According to preferred embodiments of the present invention, there is provided an isolated polypeptide encoding for a tail of HSHCGI_PEA_{—}3_P119 (SEQ ID NO:1245), comprising a polypeptide being at least 70%, optionally at least about 80%, preferably at least about 85%, more preferably at least about 90% and most preferably at least about 95% homologous to the sequence NWRKNSVKQNQDTTPSQGA (SEQ ID NO:1443) in HSHCGI_PEA_{—}3_P19 (SEQ ID NO:1245).

[0532] According to preferred embodiments of the present invention, there is provided an isolated chimeric polypeptide encoding for HSHCGI_PEA_{—}3_P4 (SEQ ID NO:1247), comprising a first amino acid sequence being at least 90% homologous to MASGQFVNKLQEEVICPICLDILQKPVTIDCGHNFCLKCITQIGETSCGFFKCPLCKTSVR KNAIRFNSLLRNLVEKIQALQASEVQSKRKEATCPRHQEMFHYFCEDDGKFLCFVCRES KDHKSHNVSLIEEAAQNYQGQIQEQIQVLQQKEKETVQVKAQGVHRVDVFTDQVEHE KQRILTEFELLHQVLEEEKNFLLSRIYWLGHEGTEAGKHYVASTEPQLNDLKKLVDSLK TKQNMPPRQLLEDIKVVLCR corresponding to amino acids 1-256 of TM31_HUMAN_V1 (SEQ ID NO:1240), which also corresponds to amino acids 1-256 of HSHCGI_PEA_{—}3_P4 (SEQ ID NO:1247), and a second amino acid sequence being at least 70%, optionally at least 80%, preferably at least 85%, more preferably at least 90% and most preferably at least 95% homologous to a polypeptide having the sequence YDGPPQMYFAY (SEQ ID NO:1444) corresponding to amino acids 257-267 of HSHCGI_PEA_{—}3_P4 (SEQ ID NO:1247), wherein said first amino acid sequence and second amino acid sequence are contiguous and in a sequential order.

[0533] According to preferred embodiments of the present invention, there is provided an isolated polypeptide encoding for a tail of HSHCGI_PEA_{—}3_P4 (SEQ ID NO:1247), comprising a polypeptide being at least 70%, optionally at least about 80%, preferably at least about 85%, more preferably at least about 90% and most preferably at least about 95% homologous to the sequence YDGPPQMYFAY (SEQ ID NO:1444) in HSHCGI_PEA_{—}3_P4 (SEQ ID NO:1247).

[0534] According to preferred embodiments of the present invention, there is provided an isolated chimeric polypeptide encoding for HSHCGI_PEA_{—}3_P6 (SEQ ID NO:1248), comprising a first amino acid sequence being at least 90% homologous to MASGQFVNKLQEEVICPICLDILQKPVTIDCGHNFCLKCITQIGETSCGFFKCPLCKTSVR KNAIRFNSLLRNLVEKIQALQASEVQSKRKEATCPRHQEMFHYFCEDDGKFLCFVCRES KDHKSHNVSLIEEAAQNYQGQIQEQIQVLQQKEKETVQVKAQGVHRVDVFTDQVEHE KQRILTEFELLHQVLEEEKNFLLSRIYWLGHEGTEAGKHYVASTEPQLNDLKKLVDSLK TKQNMPPRQLLEDIKVVLCR corresponding to amino acids 1-256 of TM31_HUMAN_V1 (SEQ ID NO:1240), which also corresponds to amino acids 1-256 of HSHCGI_PEA_{—}3_P6 (SEQ ID NO:1248), and a second amino acid sequence being at least 70%, optionally at least 80%, preferably at least 85%, more preferably at least 90% and most preferably at least 95% homologous to a polypeptide having the sequence PTPG (SEQ ID NO:1445) corresponding to amino acids 257-260 of HSHCGI_PEA_{—}3_P6 (SEQ ID NO:1248), wherein said first amino acid sequence and second amino acid sequence are contiguous and in a sequential order.

[0535] According to preferred embodiments of the present invention, there is provided an isolated polypeptide encoding for a tail of HSHCGI_PEA_{—}3_P6 (SEQ ID NO:1248), comprising a polypeptide being at least 70%, optionally at least about 80%, preferably at least about 85%, more preferably at least about 90% and most preferably at least about 95% homologous to the sequence PTPG (SEQ ID NO:1445) in HSHCGI_PEA_{—}3_P6 (SEQ ID NO:1248).

[0536] According to preferred embodiments of the present invention, there is provided an isolated chimeric polypeptide encoding for HSHCGI_PEA_{—}3_P7 (SEQ ID NO:1249), comprising a first amino acid sequence being at least 90% homologous to MASGQFVNKLQEEVICPICLDILQKPVTIDCGHNFCLKCITQIGETSCGFFKCPLCKTSVR KNAIRFNSLLRNLVEKIQALQASEVQSKRKEATCPRHQEMFHYFCEDDGKFLCFVCRES KDHKSHNVSLIEEAAQNYQGQIQEQIQVLQQKEKETVQVKAQGVHRVDVFTDQVEHE KQRILTEFELLHQVLEEEKNFLLSRIYWLGHEGTEAGKHYVASTEPQLNDLKKLVDSLK TKQNMPPRQLLEDIKVVLCRS corresponding to amino acids 1-257 of TM31_HUMAN V1 (SEQ ID NO:1240), which also corresponds to amino acids 1-257 of HSHCGI_PEA_{—}3_P7 (SEQ ID NO:1249), and a second amino acid sequence being at least 70%, optionally at least 80%, preferably at least 85%, more preferably at least 90% and most preferably at least 95% homologous to a polypeptide having the sequence SFSHTSSPDLTNQLNHIFLEVKSFSFSTQPLFLWNWRKNSVKQNQDTTPSQGA (SEQ ID NO:1446) corresponding to amino acids 258-310 of HSHCGI_PEA_{—}3_P7 (SEQ ID NO:1249), wherein said first amino acid sequence and second amino acid sequence are contiguous and in a sequential order.

[0537] According to preferred embodiments of the present invention, there is provided an isolated polypeptide encoding for a tail of HSHCGI_PEA_{—}3_P7 (SEQ ID NO:1249), comprising a polypeptide being at least 70%, optionally at least about 80%, preferably at least about 85%, more preferably at least about 90% and most preferably at least about 95% homologous to the sequence SFSHTSSPDLTNQLNHIFLEVKSFSFSTQPLFLWNWRKNSVKQNQDTTPSQGA (SEQ ID NO:1446) in HSHCGI_PEA_{—}3_P7 (SEQ ID NO:1249).

[0538] According to preferred embodiments of the present invention, there is provided an isolated chimeric polypeptide encoding for HSHCGI_PEA_{—}3_P8 (SEQ ID NO:1250), comprising a first amino acid sequence being at least 90% homologous to MASGQFVNKLQEEVICPICLDILQKPVTIDCGHNFCLKCITQIGETSCGFFKCPLCKTSVR KNAIRFNSLLRNLVEKIQALQASEVQSKRKEATCPRHQEMFHYFCEDDGKFLCFVCRES KDHKSHNVSLIEEAAQNYQGQIQEQIQVLQQKEKETVQVKAQGVHRVDVFTDQVEHE KQRILTEFELLHQVLEEEKNFLLSRIYWLGHEGTEAGKHYVASTEPQLNDLKKLVDSLK TKQNMPPRQLLEDIKVVLCRSEEFQFLNPTPVPLELEKKLSEAKSRHDSITGSLKKFKDQ LQADRKKDENRFFKSMNKNDMKSWGLLQKNNHKMNKTSEPGSSSAG corresponding to amino acids 1-342 of TM31_HUMAN_V1 (SEQ ID NO:1240), which also corresponds to amino acids 1-342 of HSHCGI_PEA_{—}3_P8 (SEQ ID NO:1250), and a second amino acid sequence being at least 70%, optionally at least 80%, preferably at least 85%, more preferably at least 90% and most preferably at least 95% homologous to a polypeptide having the sequence KSPVSEY (SEQ ID NO:1447) corresponding to amino acids 343-349 of HSHCGI_PEA_{—}3_P8 (SEQ ID NO:1250), wherein said first amino acid sequence and second amino acid sequence are contiguous and in a sequential order.

[0539] According to preferred embodiments of the present invention, there is provided an isolated polypeptide encoding for a tail of HSHCGI_PEA_{—}3_P8 (SEQ ID NO:1250), comprising a polypeptide being at least 70%, optionally at least about 80%, preferably at least about 85%, more preferably at least about 90% and most preferably at least about 95% homologous to the sequence KSPVSEY (SEQ ID NO:1447) in HSHCGI_PEA_{—}3_P8 (SEQ ID NO:1250).

[0540] According to preferred embodiments of the present invention, there is provided an isolated chimeric polypeptide encoding for HSHCGI_PEA_{—}3_P9 (SEQ ID NO:1251), comprising a first amino acid sequence being at least 90% homologous to MASGQFVNKLQEEVICPICLDILQKPVTIDCGHNFCLKCITQIGETSCGFFKCPLCKTSVR KNAIRFNSLLRNLVEKIQALQASEVQSKRKEATCPRHQEMFHYFCEDDGKFLCFVCRES KDHKSHNVSLIEEAAQNYQGQIQEQIQVLQQKEKETVQVKAQGVHRVDVFTDQVEHE KQRILTEFELLHQVLEEEKNFLLSRIYWLGHEGTEAGKHYVASTEPQLNDLKKLVDSLK TKQNMPPRQLLEDIKVVLCR corresponding to amino acids 1-256 of TM31_HUMAN_V1 (SEQ ID NO:1240), which also corresponds to amino acids 1-256 of HSHCGI_PEA_{—}3_P9 (SEQ ID NO:1251), and a second amino acid sequence being at least 70%, optionally at least 80%, preferably at least 85%, more preferably at least 90% and most preferably at least 95% homologous to a polypeptide having the sequence TGEKTQ (SEQ ID NO:1448) corresponding to amino acids 257-262 of HSHCGI_PEA_{—}3_P9 (SEQ ID NO:1251), wherein said first amino acid sequence and second amino acid sequence are contiguous and in a sequential order.

[0541] According to preferred embodiments of the present invention, there is provided an isolated polypeptide encoding for a tail of HSHCGI_PEA_{—}3_P9 (SEQ ID NO:125), comprising a polypeptide being at least 70%, optionally at least about 80%, preferably at least about 85%, more preferably at least about 90% and most preferably at least about 95% homologous to the sequence TGEKTQ (SEQ ID NO:1448) in HSHCGI_PEA_{—}3_P9 (SEQ ID NO:1251).

[0542] According to preferred embodiments of the present invention, there is provided an isolated chimeric polypeptide encoding for HSHCGI_PEA_{—}3_P12 (SEQ ID NO:1252), comprising a first amino acid sequence being at least 90% homologous to MNKNDMKSWGLLQKNNHKMNKTSEPGSSSAGGRTTSGPPNHHSSAPSHSLFRASSAG KVTFPVCLLASYDEISGQGASSQDTKTFDVALSEELHAALSEWLTAIRAWFCEVPSS corresponding to amino acids 312-425 of TM31_HUMAN (SEQ ID NO:1242), which also corresponds to amino acids 1-114 of HSHCGI_PEA_{—}3_P12 (SEQ ID NO:1252).

[0543] According to preferred embodiments of the present invention, there is provided an isolated chimeric polypeptide encoding for HSHCGI_PEA_{—}3_P14 (SEQ ID NO:1254), comprising a first amino acid sequence being at least 90% homologous to MASGQFVNKLQEEVICPICLDILQKPVTIDCGHNFCLKCITQIGETSCGFFKCPLCKTSVR KNAIRFNSLLRNLVEKIQALQASEVQSKRKEATCPRHQEMFHYFCEDDGKFLCFVCRES KDHKSHNVSLIEEAAQNYQGQIQEQIQVLQQKEKETVQVKAQGVHRVDVFTDQVEHE KQRILTEFELLHQVLEEEKNFLLSRIYWLGHEGTEAGKHYVASTEPQLNDLKKLVDSLK TKQNMPPRQLLEDIKVVLCRSEEFQFLNPTPVPLELEKKLSEAKSRHDSITGSLKKFKDQ LQADRKKDENRFFKSMNKNDMKS corresponding to amino acids 1-319 of TM31_HUMAN_V1 (SEQ ID NO:1240), which also corresponds to amino acids 1-319 of HSHCGI_PEA_{—}3_P14 (SEQ ID NO:1254), and a second amino acid sequence being at least 70%, optionally at least 80%, preferably at least 85%, more preferably at least 90% and most preferably at least 95% homologous to a polypeptide having the sequence CK corresponding to amino acids 320-321 of HSHCGI_PEA_{—}3_P14 (SEQ ID NO:1254), wherein said first amino acid sequence and second amino acid sequence are contiguous and in a sequential order.

[0544] According to preferred embodiments of the present invention, there is provided an isolated chimeric polypeptide encoding for HSHCGI_PEA_{—}3_P16 (SEQ ID NO:1256), comprising a first amino acid sequence being at least 90% homologous to MASGQFVNKLQEEVICPICLDILQKPVTIDCGHNFCLKCITQIGETSCGFFKCPLCKTSVR KNAIRFNSLLRNLVEKIQALQASEVQSKRKEATCPRHQEMFHYFCEDDGKFLCFVCRES KDHKSHNVSLIEEAAQNYQGQIQEQIQVLQQKEKETVQVKAQGVHRVDVFT corresponding to amino acids 1-171 of TM31_HUMAN_V1 (SEQ ID NO:1240), which also corresponds to amino acids 1-171 of HSHCGI_PEA_{—}3_P16 (SEQ ID NO:1256), and a second amino acid sequence being at least 70%, optionally at least 80%, preferably at least 85%, more preferably at least 90% and most preferably at least 95% homologous to a polypeptide having the sequence VRKTPSHDLWKQKHLCQSSWNPLLH (SEQ ID NO:1449) corresponding to amino acids 172-196 of HSHCGI_PEA_{—}3_P16 (SEQ ID NO:1256), wherein said first amino acid sequence and second amino acid sequence are contiguous and in a sequential order.

[0545] According to preferred embodiments of the present invention, there is provided an isolated polypeptide encoding for a tail of HSHCGI_PEA_{—}3_P16 (SEQ ID NO:1256), comprising a polypeptide being at least 70%, optionally at least about 80%, preferably at least about 85%, more preferably at least about 90% and most preferably at least about 95% homologous to the sequence VRKTPSHDLWKQKHLCQSSWNPLLH (SEQ ID NO:1449) in HSHCGI_PEA_{—}3_P16 (SEQ ID NO:1256).

[0546] According to preferred embodiments of the present invention, there is provided an isolated chimeric polypeptide encoding for HSHCGI_PEA_{—}3_P21 (SEQ ID NO:1258), comprising a first amino acid sequence being at least 70%, optionally at least 80%, preferably at least 85%, more preferably at least 90% and most preferably at least 95% homologous to a polypeptide having the sequence MHHSDWGNIMWIFQMSPLQNFRKEERNQ (SEQ ID NO:1450) corresponding to amino acids 1-28 of HSHCGI_PEA_{—}3_P21 (SEQ ID NO:1258), and a second amino acid sequence being at least 90% homologous to FLCFVCRESKDHKSHNVSLIEEAAQNYQGQIQEQIQVLQQKEKETVQVKAQGVHRVDV FTDQVEHEKQRILTEFELLHQVLEEEKNFLLSRIYWLGHEGTEAGKHYVASTEPQLNDL KKLVDSLKTKQNMPPRQLLEDIKVVLCRSEEFQFLNPTPVPLELEKKLSEAKSRHDSITG SLKKFKDQLQADRKKDENRFFKSMNKNDMKSWGLLQKNNHKMNKTSEPGSSSAGGR TTSGPPNHHSSAPSHSLFRASSAGKVTFPVCLLASYDEISGQGASSQDTKTFDVALSEEL HAALSEWLTAIRAWFCEVPSS corresponding to amino acids 112-425 of TM31_HUMAN (SEQ ID NO:1242), which also corresponds to amino acids 29-342 of HSHCGI_PEA_{—}3_P21 (SEQ ID NO:1258), wherein said first amino acid sequence and second amino acid sequence are contiguous and in a sequential order.

[0547] According to preferred embodiments of the present invention, there is provided an isolated polypeptide encoding for a head of HSHCGI_PEA_{—}3_P21 (SEQ ID NO:1258), comprising a polypeptide being at least 70%, optionally at least about 80%, preferably at least about 85%, more preferably at least about 90% and most preferably at least about 95% homologous to the sequence MHHSDWGNIMWIFQMSPLQNFRKEERNQ (SEQ ID NO:1450) of HSHCGI_PEA_{—}3_P21 (SEQ ID NO:1258).

[0548] According to preferred embodiments of the present invention, there is provided an isolated chimeric polypeptide encoding for HSHCGI_PEA_{—}3_P22 (SEQ ID NO:1259), comprising a first amino acid sequence being at least 90% homologous to MPPRQLLEDIKVVLCRSEEFQFLNPTPVPLELEKKLSEAKSRHDSITGSLKKFKDQLQAD RKKDENRFFKSMNKNDMKSWGLLQKNNHKMNKTSEPGSSSAGGRTTSGPPNHHSSAP SHSLFRASSAGKVTFPVCLLASYDEISGQGASSQDTKTFDVALSEELHAALSEWLTAIRA WFCEVPSS corresponding to amino acids 241-425 of TM31_HUMAN (SEQ ID NO:1242), which also corresponds to amino acids 1-185 of HSHCGI_PEA_{—}3_P22 (SEQ ID NO:1259).

[0549] According to preferred embodiments of the present invention, there is provided an isolated chimeric polypeptide encoding for T51958_PEA_{—}1_P5 (SEQ ID NO:1151), comprising a first amino acid sequence being at least 90% homologous to MGAARGSPARPRRLPLLSVLLLPLLGGTQTAIVFIKQPSSQDALQGRRALLRCEVEAPGP VHVYWLLDGAPVQDTERRFAQGSSLSFAAVDRLQDSGTFQCVARDDVTGEEARSANA SFNIKWIEAGPVVLKHPASEAEIQPQTQVTLRCHIDGHPRPTYQWFRDGTPLSDGQSNH TVSSKERNLTLRPAGPEHSGLYSCCAHSAFGQACSSQNFTLSIADESFARVVLAPQDVV VARYEEAMFHCQFSAQPPPSLQWLFEDETPITNRSRPPHLRRATVFANGSLLLTQVRPR NAGIYRCIGQGQRGPPIILEATLHLAEIEDMPLFEPRVFTAGSEERVTCLPPKGLPEPSVW WEHAGVRLPTHGRVYQKGHELVLANIAESDAGVYTCHAANLAGQRRQDVNITVATVP SWLKKPQDSQLEEGKPGYLDCLTQATPKPTVVWYRNQMLISEDSRFEVFKNGTLRINS VEVYDGTWYRCMSSTPAGSIEAQARVQVLEKLKFTPPPQPQQCMEFDKEATVPCSATG REKPTIKWERADGSSLPEWVTDNAGTLHFARVTRDDAGNYTCIASNGPQGQIRAHVQL TVAVFITFKVEPERTTVYQGHTALLQCEAQGDPKPLIQWKGKDRILDPTKLGPRMHIFQ NGSLVIHDVAPEDSGRYTCIAGNSCNIKHTEAPLYVV corresponding to amino acids 1-682 of PTK7_HUMAN_V4 (SEQ ID NO:1143), which also corresponds to amino acids 1-682 of T51958_PEA_{—}1_P5 (SEQ ID NO:1151), and a second amino acid sequence being at least 70%, optionally at least 80%, preferably at least 85%, more preferably at least 90% and most preferably at least 95% homologous to a polypeptide having the sequence GMGWGGLCCTGSGGPRRLSPCTQPLCTEHGTEAIFVAAVGIRPSHHAAAQS (SEQ ID NO: 1451) corresponding to amino acids 683-733 of T51958_PEA_{—}1_P5 (SEQ ID NO:1151), wherein said first amino acid sequence and second amino acid sequence are contiguous and in a sequential order.

[0550] According to preferred embodiments of the present invention, there is provided an isolated polypeptide encoding for a tail of T51958_PEA_{—}1_P5 (SEQ ID NO:1151), comprising a polypeptide being at least 70%, optionally at least about 80%, preferably at least about 85%, more preferably at least about 90% and most preferably at least about 95% homologous to the sequence GMGWGGLCCTGSGGPRRLSPCTQPLCTEHGTEAIFVAAVGIRPSHHAAAQS (SEQ ID NO:1451) in T51958_PEA_{—}1_{—P}5 (SEQ ID NO:1151).

[0551] According to preferred embodiments of the present invention, there is provided an isolated chimeric polypeptide encoding for T51958_PEA_{—}1_P6 (SEQ ID NO:1152), comprising a first amino acid sequence being at least 90% homologous to MGAARGSPARPRRLPLLSVLLLPLLGGTQTAIVFIKQPSSQDALQGRRALLRCEVEAPGP VHVYWLLDGAPVQDTERRFAQGSSLSFAAVDRLQDSGTFQCVARDDVTGEEARSANA SFNIKWIEAGPVVLKHPASEAEIQPQTQVTLRCHIDGHPRPTYQWFRDGTPLSDGQSNH TVSSKERNLTLRPAGPEHSGLYSCCAHSAFGQACSSQNFTLSIADESFARVVLAPQDVV VARYEEAMFHCQFSAQPPPSLQWLFEDETPITNRSRPPHLRRATVFANGSLLLTQVRPR NAGIYRCIGQGQRGPPIILEATLHLAEIEDMPLFEPRVFTAGSEERVTCLPPKGLPEPSVW WEHAGVRLPTHGRVYQKGHELVLANIAESDAGVYTCHAANLAGQRRQDVNITVATVP SWLKKPQDSQLEEGKPGYLDCLTQATPKPTVVWYRNQMLISEDSRFEVFKNGTLRINS VEVYDGTWYRCMSSTPAGSIEAQARVQVLEKLKFTPPPQPQQCMEFDKEATVPCSATG REKPTIKWERADGS SLPEWVTDNAGTLHFARVTRDDAGNYTCIASNGPQGQIRAHVQL TVAVFITFKVEPERTTVYQGHTALLQCEAQGDPKPLIQWKGKDRILDPTKLGPRM corresponding to amino acids 1-641 of PTK7_HUMAN_V4 (SEQ ID NO:1143), which also corresponds to amino acids 1-641 of T51958_PEA_{—}1_P6 (SEQ ID NO:1152), and a second amino acid sequence being at least 70%, optionally at least 80%, preferably at least 85%, more preferably at least 90% and most preferably at least 95% homologous to a polypeptide having the sequence APW corresponding to amino acids 642-644 of T51958_PEA_{—}1_P6 (SEQ ID NO:1152), wherein said first amino acid sequence and second amino acid sequence are contiguous and in a sequential order.

[0552] According to preferred embodiments of the present invention, there is provided an isolated chimeric polypeptide encoding for T51958_PEA_{—}1_P28 (SEQ ID NO:1153), comprising a first amino acid sequence being at least 90% homologous to MGAARGSPARPRRLPLLSVLLLPLLGGTQTAIVFIKQPSSQDALQGRRALLRCEVEAPGP VHVYWLLDGAPVQDTERRFAQGSSLSFAAVDRLQDSGTFQCVARDDVTGEEARSANA SFNIKWIEAGPVVLKHPASEAEIQPQTQVTLRCHIDGHPRPTYQWFRDGTPLSDGQSNH TVSSKERNLTLRPAGPEHSGLYSCCAHSAFGQACSSQNFTLSIADESFARVVLAPQDVV VARYEEAMFHCQFSAQPPPSLQWLFEDETPITNRSRPPHLRRATVFANGSLLLTQVRPR NAGIYRCIGQGQRGPPIILEATLHLAEIEDMPLFEPRVFTAGSEERVTCLPPKGLPEPSVW WEHAGVRLPTHGRVYQKGHELVLANIAESDAGVYTCHAANLAGQRRQDVNITVA corresponding to amino acids 1-409 of PTK7_HUMAN_V11 (SEQ ID NO:1144), which also corresponds to amino acids 1-409 of T51958_PEA_{—}1_P28 (SEQ ID NO:1153), and a second amino acid sequence being at least 70%, optionally at least 80%, preferably at least 85%, more preferably at least 90% and most preferably at least 95% homologous to a polypeptide having the sequence SEHLCPEGQGEVEGNTGLGVMDRGFPGTHLRSSQFWALQAWESVHYWESV (SEQ ID NO:1452) corresponding to amino acids 410-459 of T51958_PEA_{—}1_P28 (SEQ ID NO:1153), wherein said first amino acid sequence and second amino acid sequence are contiguous and in a sequential order.

[0553] According to preferred embodiments of the present invention, there is provided an isolated polypeptide encoding for a tail of T51958_PEA_{—}1_P28 (SEQ ID NO:1153), comprising a polypeptide being at least 70%, optionally at least about 80%, preferably at least about 85%, more preferably at least about 90% and most preferably at least about 95% homologous to the sequence SEHLCPEGQGEVEGNTGLGVMDRGFPGTHLRSSQFWALQAWESVHYWESV (SEQ ID NO:1452) in T51958_PEA_{—}1_P28 (SEQ ID NO:1153).

[0554] According to preferred embodiments of the present invention, there is provided an isolated chimeric polypeptide encoding for T51958_PEA_{—}1_P28 (SEQ ID NO:1153), comprising a first amino acid sequence being at least 90% homologous to MGAARGSPARPRRLPLLSVLLLPLLGGTQTAIVFIKQPSSQDALQGRRALLRCEVEAPGP VHVYWLLDGAPVQDTERRFAQGSSLSFAAVDRLQDSGTFQCVARDDVTGEEARSANA SFNIKWIEAGPVVLKHPASEAEIQPQTQVTLRCHIDGHPRPTYQWFRDGTPLSDGQSNH TVSSKERNLTLRPAGPEHSGLYSCCAHSAFGQACSSQNFTLSIADESFARVVLAPQDVV VARYEEAMFHCQFSAQPPPSLQWLFEDETPITNRSRPPHLRRATVFANGSLLLTQVRPR NAGIYRCIGQGQRGPPIILEATLHLAEIEDMPLFEPRVFTAGSEERVTCLPPKGLPEPSVW WEHAGVRLPTHGRVYQKGHELVLANIAESDAGVYTCHAANLAGQRRQDVNITVA corresponding to amino acids 1-409 of Q8NFA5 (SEQ ID NO:1147), which also corresponds to amino acids 1-409 of T51958_PEA_{—}1_P28 (SEQ ID NO:1153), and a second amino acid sequence being at least 70%, optionally at least 80%, preferably at least 85%, more preferably at least 90% and most preferably at least 95% homologous to a polypeptide having the sequence SEHLCPEGQGEVEGNTGLGVMDRGFPGTHLRSSQFWALQAWESVHYWESV (SEQ ID NO:1452) corresponding to amino acids 410-459 of T51958_PEA_{—}1_P28 (SEQ ID NO:1153), wherein said first amino acid sequence and second amino acid sequence are contiguous and in a sequential order.

[0555] According to preferred embodiments of the present invention, there is provided an isolated polypeptide encoding for a tail of T51958_PEA_{—}1_P28 (SEQ ID NO:1153), comprising a polypeptide being at least 70%, optionally at least about 80%, preferably at least about 85%, more preferably at least about 90% and most preferably at least about 95% homologous to the sequence SEHLCPEGQGEVEGNTGLGVMDRGFPGTHLRSSQFWALQAWESVHYWESV (SEQ ID NO:1452) in T51958_PEA_{—}1_P28 (SEQ ID NO:1153).

[0556] According to preferred embodiments of the present invention, there is provided an isolated chimeric polypeptide encoding for T51958_PEA_{—}1_P28 (SEQ ID NO:1153), comprising a first amino acid sequence being at least 90% homologous to MGAARGSPARPRRLPLLSVLLLPLLGGTQTAIVFIKQPSSQDALQGRRALLRCEVEAPGP VHVYWLLDGAPVQDTERRFAQGSSLSFAAVDRLQDSGTFQCVARDDVTGEEARSANA SFNIKWIEAGPVVLKHPASEAEIQPQTQVTLRCHIDGHPRPTYQWFRDGTPLSDGQSNH TVSSKERNLTLRPAGPEHSGLYSCCAHSAFGQACSSQNFTLSIADESFARVVLAPQDVV VARYEEAMFHCQFSAQPPPSLQWLFEDETPITNRSRPPHLRRATVFANGSLLLTQVRPR NAGIYRCIGQGQRGPPIILEATLHLAEIEDMPLFEPRVFTAGSEERVTCLPPKGLPEPSVW WEHAGVRLPTHGRVYQKGHELVLANIAESDAGVYTCHAANLAGQRRQDVNITVA corresponding to amino acids 1-409 of Q8NFA6 (SEQ ID NO:1149), which also corresponds to amino acids 1-409 of T51958_PEA_{—}1_P28 (SEQ ID NO:1153), and a second amino acid sequence being at least 70%, optionally at least 80%, preferably at least 85%, more preferably at least 90% and most preferably at least 95% homologous to a polypeptide having the sequence SEHLCPEGQGEVEGNTGLGVMDRGFPGTHLRSSQFWALQAWESVHYWESV (SEQ ID NO:1452) corresponding to amino acids 410-459 of T51958_PEA_{—}1_P28 (SEQ ID NO:1153), wherein said first amino acid sequence and second amino acid sequence are contiguous and in a sequential order.

[0557] According to preferred embodiments of the present invention, there is provided an isolated polypeptide encoding for a tail of T51958_PEA_{—}1_P28 (SEQ ID NO:1153), comprising a polypeptide being at least 70%, optionally at least about 80%, preferably at least about 85%, more preferably at least about 90% and most preferably at least about 95% homologous to the sequence SEHLCPEGQGEVEGNTGLGVMDRGFPGTHLRSSQFWALQAWESVHYWESV (SEQ ID NO:1452) in T51958_PEA_{—}1_P28 (SEQ ID NO:1153).

[0558] According to preferred embodiments of the present invention, there is provided an isolated chimeric polypeptide encoding for T51958_PEA_{—}1_P28 (SEQ ID NO:1153), comprising a first amino acid sequence being at least 90% homologous to MGAARGSPARPRRLPLLSVLLLPLLGGTQTAIVFIKQPSSQDALQGRRALLRCEVEAPGP VHVYWLLDGAPVQDTERRFAQGSSLSFAAVDRLQDSGTFQCVARDDVTGEEARSANA SFNIKWIEAGPVVLKHPASEAEIQPQTQVTLRCHIDGHPRPTYQWFRDGTPLSDGQSNH TVSSKERNLTLRPAGPEHSGLYSCCAHSAFGQACSSQNFTLSIADESFARVVLAPQDVV VARYEEAMFHCQFSAQPPPSLQWLFEDETPITNRSRPPHLRRATVFANGSLLLTQVRPR NAGIYRCIGQGQRGPPIILEATLHLAEIEDMPLFEPRVFTAGSEERVTCLPPKGLPEPSVW WEHAGVRLPTHGRVYQKGHELVLANIAESDAGVYTCHAANLAGQRRQDVNITVA corresponding to amino acids 1-409 of Q8NFA7 (SEQ ID NO:1148), which also corresponds to amino acids 1-409 of T51958_PEA_{—}1_P28 (SEQ ID NO:1153), and a second amino acid sequence being at least 70%, optionally at least 80%, preferably at least 85%, more preferably at least 90% and most preferably at least 95% homologous to a polypeptide having the sequence SEHLCPEGQGEVEGNTGLGVMDRGFPGTHLRSSQFWALQAWESVHYWESV (SEQ ID NO:1452) corresponding to amino acids 410-459 of T51958_PEA_{—}1_P28 (SEQ ID NO:1153), wherein said first amino acid sequence and second amino acid sequence are contiguous and in a sequential order.

[0559] According to preferred embodiments of the present invention, there is provided an isolated polypeptide encoding for a tail of T51958_PEA_{—}1_P28 (SEQ ID NO:1153), comprising a polypeptide being at least 70%, optionally at least about 80%, preferably at least about 85%, more preferably at least about 90% and most preferably at least about 95% homologous to the sequence SEHLCPEGQGEVEGNTGLGVMDRGFPGTHLRSSQFWALQAWESVHYWESV (SEQ ID NO:1452) in T51958_PEA_{—}1_P28 (SEQ ID NO:1153).

[0560] According to preferred embodiments of the present invention, there is provided an isolated chimeric polypeptide encoding for T51958_PEA_{—}1_P28 (SEQ ID NO:1153), comprising a first amino acid sequence being at least 90% homologous to MGAARGSPARPRRLPLLSVLLLPLLGGTQTAIVFIKQPSSQDALQGRRALLRCEVEAPGP VHVYWLLDGAPVQDTERRFAQGSSLSFAAVDRLQDSGTFQCVARDDVTGEEARSANA SFNIKWIEAGPVVLKHPASEAEIQPQTQVTLRCHIDGHPRPTYQWFRDGTPLSDGQSNH TVSSKERNLTLRPAGPEHSGLYSCCAHSAFGQACSSQNFTLSIADESFARVVLAPQDVV VARYEEAMFHCQFSAQPPPSLQWLFEDETPITNRSRPPHLRRATVFANGSLLLTQVRPR NAGIYRCIGQGQRGPPIILEATLHLAEIEDMPLFEPRVFTAGSEERVTCLPPKGLPEPSVW WEHAGVRLPTHGRVYQKGHELVLANIAESDAGVYTCHAANLAGQRRQDVNITVA corresponding to amino acids 1-409 of Q8NFA8 (SEQ ID NO:1146), which also corresponds to amino acids 1-409 of T51958_PEA_{—}1_P28 (SEQ ID NO:153), and a second amino acid sequence being at least 70%, optionally at least 80%, preferably at least 85%, more preferably at least 90% and most preferably at least 95% homologous to a polypeptide having the sequence SEHLCPEGQGEVEGNTGLGVMDRGFPGTHLRSSQFWALQAWESVHYWESV (SEQ ID NO:1452) corresponding to amino acids 410-459 of T51958_PEA_{—}1_P28 (SEQ ID NO:1153), wherein said first amino acid sequence and second amino acid sequence are contiguous and in a sequential order.

[0561] According to preferred embodiments of the present invention, there is provided an isolated polypeptide encoding for a tail of T51958_PEA_{—}1_P28 (SEQ ID NO:1153), comprising a polypeptide being at least 70%, optionally at least about 80%, preferably at least about 85%, more preferably at least about 90% and most preferably at least about 95% homologous to the sequence SEHLCPEGQGEVEGNTGLGVMDRGFPGTHLRSSQFWALQAWESVHYWESV (SEQ ID NO:1452) in T51958_PEA_{—}1_P28 (SEQ ID NO:1153).

[0562] According to preferred embodiments of the present invention, there is provided an isolated chimeric polypeptide encoding for T51958_PEA_{—}1_P28 (SEQ ID NO:1153), comprising a first amino acid sequence being at least 90% homologous to MGAARGSPARPRRLPLLSVLLLPLLGGTQTAIVFIKQPSSQDALQGRRALLRCEVEAPGP VHVYWLLDGAPVQDTERRFAQGSSLSFAAVDRLQDSGTFQCVARDDVTGEEARSANA SFNIKWIEAGPVVLKHPASEAEIQPQTQVTLRCHIDGHPRPTYQWFRDGTPLSDGQSNH TVSSKERNLTLRPAGPEHSGLYSCCAHSAFGQACSSQNFTLSIADESFARVVLAPQDVV VARYEEAMFHCQFSAQPPPSLQWLFEDETPITNRSRPPHLRRATVFANGSLLLTQVRPR NAGIYRCIGQGQRGPPIILEATLHLAEIEDMPLFEPRVFTAGSEERVTCLPPKGLPEPSVW WEHAGVRLPTHGRVYQKGHELVLANIAESDAGVYTCHAANLAGQRRQDVNITVA corresponding to amino acids 1-409 of AAN04862 (SEQ ID NO:1150), which also corresponds to amino acids 1-409 of T51958_PEA_{—}1_P28 (SEQ ID NO:1153), and a second amino acid sequence being at least 70%, optionally at least 80%, preferably at least 85%, more preferably at least 90% and most preferably at least 95% homologous to a polypeptide having the sequence SEHLCPEGQGEVEGNTGLGVMDRGFPGTHLRSSQFWALQAWESVHYWESV (SEQ ID NO:1452) corresponding to amino acids 410-459 of T51958_PEA_{—}1_P28 (SEQ ID NO:1153), wherein said first amino acid sequence and second amino acid sequence are contiguous and in a sequential order.

[0563] According to preferred embodiments of the present invention, there is provided an isolated polypeptide encoding for a tail of T51958_PEA_{—}1_P28 (SEQ ID NO:1153), comprising a polypeptide being at least 70%, optionally at least about 80%, preferably at least about 85%, more preferably at least about 90% and most preferably at least about 95% homologous to the sequence SEHLCPEGQGEVEGNTGLGVMDRGFPGTHLRSSQFWALQAWESVHYWESV (SEQ ID NO:1452) in T51958_PEA_{—}1_P28 (SEQ ID NO:1153).

[0564] According to preferred embodiments of the present invention, there is provided an isolated chimeric polypeptide encoding for T51958_PEA_{—}1_P30 (SEQ ID NO:1154), comprising a first amino acid sequence being at least 90% homologous to MGAARGSPARPRRLPLLSVLLLPLLGGTQTAIVFIKQPSSQDALQGRRALLRCEVEAPGP VHVYWLLDGAPVQDTERRFAQGSSLSFAAVDRLQDSGTFQCVARDDVTGEEARSANA SFNIK corresponding to amino acids 1-122 of PTK7_HUMAN (SEQ ID NO:1141)_V13 (SEQ ID NO:1145), which also corresponds to amino acids 1-122 of T51958_PEA_{—}1_P30 (SEQ ID NO:1154), and a second amino acid sequence being at least 70%, optionally at least 80%, preferably at least 85%, more preferably at least 90% and most preferably at least 95% homologous to a polypeptide having the sequence CESQGGCAQSPCQTLND (SEQ ID NO:1453) corresponding to amino acids 123-139 of T51958_PEA_{—}1_P30 (SEQ ID NO:1154), wherein said first amino acid sequence and second amino acid sequence are contiguous and in a sequential order.

[0565] According to preferred embodiments of the present invention, there is provided an isolated polypeptide encoding for a tail of T51958_PEA_{—}1_P30 (SEQ ID NO:1154), comprising a polypeptide being at least 70%, optionally at least about 80%, preferably at least about 85%, more preferably at least about 90% and most preferably at least about 95% homologous to the sequence CESQGGCAQSPCQTLND (SEQ ID NO:1453) in T51958_PEA_{—}1_P30 (SEQ ID NO:1154).

[0566] According to preferred embodiments of the present invention, there is provided an isolated chimeric polypeptide encoding for T51958_PEA_{—}1_P34 (SEQ ID NO:1155), comprising a first amino acid sequence being at least 90% homologous to MGAARGSPARPRRLPLLSVLLLPLLGGTQTAIVFIKQPSSQDALQGRRALLRCEVEAPGP VHVYWLLDGAPVQDTERRFAQGSSLSFAAVDRLQDSGTFQCVARDDVTGEEARSANA SFNIKWIEAGPVVLKHPASEAEIQPQTQVTLRCHIDGHPR corresponding to amino acids 1-157 of PTK7_HUMAN_V3 (SEQ ID NO:1142), which also corresponds to amino acids 1-157 of T51958_PEA_{—}1_P34 (SEQ ID NO:1155).

[0567] According to preferred embodiments of the present invention, there is provided an isolated chimeric polypeptide encoding for T51958_PEA_{—}1_P35 (SEQ ID NO:1156), comprising a first amino acid sequence being at least 90% homologous to MGAARGSPARPRRLPLLSVLLLPLLGGTQTAIVFIKQPSSQDALQGRRALLRCEVEAPGP VHVYWLLDGAPVQDTERRFAQGSSLSFAAVDRLQDSGTFQCVARDDVTGEEARSANA SFNIKWIEAGPVVLKHPASEAEIQPQTQVTLRCHIDGHPRPTYQWFRDGTPLSDGQSNH TVSSKERNLTLRPAGPEHSGLYSCCAHSAFGQACSSQNFTLSIA corresponding to amino acids 1-220 of PTK7_HUMAN_V11 (SEQ ID NO:1144), which also corresponds to amino acids 1-220 of T51958_PEA_{—}1_P35 (SEQ ID NO:1156), and a second amino acid sequence being at least 70%, optionally at least 80%, preferably at least 85%, more preferably at least 90% and most preferably at least 95% homologous to a polypeptide having the sequence GEPGVGAEGMR (SEQ ID NO:1454) corresponding to amino acids 221-231 of T51958_PEA_{—}1_P35 (SEQ ID NO:1156), wherein said first amino acid sequence and second amino acid sequence are contiguous and in a sequential order.

[0568] According to preferred embodiments of the present invention, there is provided an isolated polypeptide encoding for a tail of T51958_PEA_{—}1_P35 (SEQ ID NO:1156), comprising a polypeptide being at least 70%, optionally at least about 80%, preferably at least about 85%, more preferably at least about 90% and most preferably at least about 95% homologous to the sequence GEPGVGAEGMR (SEQ ID NO:1454) in T51958_PEA_{—}1_P35 (SEQ ID NO:1156).

[0569] According to preferred embodiments of the present invention, there is provided an isolated chimeric polypeptide encoding for T23657_P2 (SEQ ID NO:1064), comprising a first amino acid sequence being at least 90% homologous to MPLHQLGDKPLTFPSPNSAMENGLDHTPPSRRASPGTPLSPGSLRSAAHSPLDTSKQPLC QLWAEKHGARGTHEVRYVSAGQSVACGWWAFAPPCLQVLNTPKGILFFLCAAAFLQG MTVNGFINTVITSLERRYDLHSYQSGLIASSYDIAACLCLTFVSYFGGSGHKPRWLGWG VLLMGTGSLVFALPHFTAGRYEVELDAGVRTCPANPGAVCADSTSGLSRYQLVFMLG QFLHGVGATPLYTLGVTYLDENVKSSCSPVYIAIFYTAAILGPAAGYLIGGALLNIYTEM GRRTELTTESPLWVGAWWVGFLGSGAAAFFTAVPILGYPRQLPGSQRYAVMRAAEMH QLKDSSRGEASNPDFGKTIRDLPLSIWLLLKNPTFILLCLAGATEATLITGMSTFSPKFLES QFSLSASEAATLFGYLVVPAGGGGTFLGGFFVNKLRLRGSAVIKFCLFCTVVSLLGILVF SLHCPSVPMAGVTASYGGSLLPEGHLNLTAPCNAACSCQPEHYSPVCGSDGLMYFSLC HAGCPAATETNVDGQKVYRDCSCIPQNLSSGFGHATAGKCTSTCQRKPLLLVFIFVVIFF TFLSSIPALTATLRCVRDPQRSFALGIQWIVVRILGGIPGPIAFGWVIDKACLLWQDQCG QQGSCLVYQNSAMSRYILIMGLLYK corresponding to amino acids 1-675 of S21C_HUMAN (SEQ ID NO:1062), which also corresponds to amino acids 1-675 of T23657_P2 (SEQ ID NO:1064), and a second amino acid sequence being at least 70%, optionally at least 80%, preferably at least 85%, more preferably at least 90% and most preferably at least 95% homologous to a polypeptide having the sequence FQLPEVHHSLNVLNRKFQKQTVHNL (SEQ ID NO:1455) corresponding to amino acids 676-700 of T23657_P2 (SEQ ID NO:1064), wherein said first amino acid sequence and second amino acid sequence are contiguous and in a sequential order.

[0570] According to preferred embodiments of the present invention, there is provided an isolated polypeptide encoding for a tail of T23657_P2 (SEQ ID NO:1064), comprising a polypeptide being at least 70%, optionally at least about 80%, preferably at least about 85%, more preferably at least about 90% and most preferably at least about 95% homologous to the sequence FQLPEVHHSLNVLNRKFQKQTVHNL (SEQ ID NO:1455) in T23657_P2 (SEQ ID NO:1064).

[0571] According to preferred embodiments of the present invention, there is provided an isolated chimeric polypeptide encoding for T23657_P3 (SEQ ID NO:1065), comprising a first amino acid sequence being at least 90% homologous to MPLHQLGDKPLTFPSPNSAMENGLDHTPPSRRASPGTPLSPGSLRSAAHSPLDTSKQPLC QLWAEKHGARGTHEVRYVSAGQSVACGWWAFAPPCLQVLNTPKGILFFLCAAAFLQG MTVNGFINTVITSLERRYDLHSYQSGLIASSYDIAACLCLTFVSYFGGSGHKPRWLGWG VLLMGTGSLVFALPHFTAGRYEVELDAGVRTCPANPGAVCADSTSGLSRYQLVFMLG QFLHGVGATPLYTLGVTYLDENVKSSCSPVYIAIFYTAAILGPAAGYLIGGALLNIYTEM GRRTELTTESPLWVGAWWVGFLGSGAAAFFTAVPILGYPRQLPGSQRYAVMRAAEMH QLKDSSRGEASNPDFGKTIRDLPLSIWLLLKNPTFILLCLAGATEATLITGMSTFSPKFLES QFSLSASEAATLFGYLVVPAGGGGTFLGGFFVNKLRLRGSAVIKFCLFCTVVSLLGILVF SLHCPSVPMAGVTASYGGSLLPEGHLNLTAPCNAACSCQPEHYSPVCGSDGLMYFSLC HAGCPAATETNVDGQKVYRDCSCIPQNLSSGFGHATAGKCTSTCQRKPLLLVFIFVVIFF TFLSSIPALTATLRCVRDPQRSFALGIQWIVVRILGGIPGPIAFGWVIDKACLLWQDQCG QQGSCLVYQNSAMSRYILIMGLLYK corresponding to amino acids 1-675 of S21 C_HUMAN (SEQ ID NO:1062), which also corresponds to amino acids 1-675 of T23657_P3 (SEQ ID NO:1065), and a second amino acid sequence being at least 70%, optionally at least 80%, preferably at least 85%, more preferably at least 90% and most preferably at least 95% homologous to a polypeptide having the sequence TIKHKAF (SEQ ID NO:1456) corresponding to amino acids 676-682 of T23657_P3 (SEQ ID NO:1065), wherein said first amino acid sequence and second amino acid sequence are contiguous and in a sequential order.

[0572] According to preferred embodiments of the present invention, there is provided an isolated polypeptide encoding for a tail of T23657_P3 (SEQ ID NO:1065), comprising a polypeptide being at least 70%, optionally at least about 80%, preferably at least about 85%, more preferably at least about 90% and most preferably at least about 95% homologous to the sequence TIKHKAF (SEQ ID NO:1456) in T23657_P3 (SEQ ID NO:1065).

[0573] According to preferred embodiments of the present invention, there is provided an isolated chimeric polypeptide encoding for T23657_P4 (SEQ ID NO:1066), comprising a first amino acid sequence being at least 90% homologous to MPLHQLGDKPLTFPSPNSAMENGLDHTPPSRRASPGTPLSPGSLRSAAHSPLDTSKQPLC QLWAEKHGARGTHEVRYVSAGQSVACGWWAFAPPCLQVLNTPKGILFFLCAAAFLQG MTVNGFINTVITSLERRYDLHSYQSGLIASSYDIAACLCLTFVSYFGGSGHKPRWLGWG VLLMGTGSLVFALPHFTAGRYEVELDAGVRTCPANPGAVCADSTSGLSRYQLVFMLG QFLHGVGATPLYTLGVTYLDENVKSSCSPVYIAIFYTAAILGPAAGYLIGGALLNIYTEM GRRTELTTESPLWVGAWWVGFLGSGAAAFFTAVPILGYPRQLPGSQRYAVMRAAEMH QLKDSSRGEASNPDFGKTIRDLPLSIWLLLKNPTFILLCLAGATEATLITGMSTFSPKFLES QFSLSASEAATLFGYLVVPAGGGGTFLGGFFVNKLRLRGSAVIKFCLFCTVVSLLGILVF SLHCPSVPMAGVTASYGGSLLPEGHLNLTAPCNAACSCQPEHYSPVCGSDGLMYFSLC HAGCPAATETNVDGQKVYRDCSCIPQNLSSGFGHATAGKCTSTCQRKPLLLVFIFVVIFF TFLSSIPALTATLRCVRDPQRSFALGIQWIVVRIL corresponding to amino acids 1-625 of S21C_HUMAN (SEQ ID NO:1062), which also corresponds to amino acids 1-625 of T23657_P4 (SEQ ID NO:1066), a second amino acid sequence being at least 70%, optionally at least 80%, preferably at least 85%, more preferably at least 90% and most preferably at least 95% homologous to a polypeptide having the sequence GTVQCEEAMVSCTVCSLHKGM corresponding to amino acids 626-646 of T23657_P4 (SEQ ID NO:1066), a third amino acid sequence being at least 90% homologous to GGIPGPIAFGWVIDKACLLWQDQCGQQGSCLVYQNSAMSRYILIMGLLYK corresponding to amino acids 626-675 of S21C_HUMAN (SEQ ID NO:1062), which also corresponds to amino acids 647-696 of T23657_P4 (SEQ ID NO:1066)+ and a fourth amino acid sequence being at least 70%, optionally at least 80%, preferably at least 85%, more preferably at least 90% and most preferably at least 95% homologous to a polypeptide having the sequence TIKHKAF (SEQ ID NO:1456) corresponding to amino acids 697-703 of T23657_P4 (SEQ ID NO:1066), wherein said first amino acid sequence, second amino acid sequence, third amino acid sequence and fourth amino acid sequence are contiguous and in a sequential order.

[0574] According to preferred embodiments of the present invention, there is provided an isolated polypeptide encoding for an edge portion of T23657_P4 (SEQ ID NO:1066), comprising an amino acid sequence being at least 70%, optionally at least about 80%, preferably at least about 85%, more preferably at least about 90% and most preferably at least about 95% homologous to the sequence encoding for GTVQCEEAMVSCTVCSLHKGM, corresponding to T23657_P4 (SEQ ID NO:1066).

[0575] According to preferred embodiments of the present invention, there is provided an isolated polypeptide encoding for a tail of T23657_P4 (SEQ ID NO:1066), comprising a polypeptide being at least 70%, optionally at least about 80%, preferably at least about 85%, more preferably at least about 90% and most preferably at least about 95% homologous to the sequence TIKHKAF (SEQ ID NO:1456) in T23657_P4 (SEQ ID NO:1066).

[0576] According to preferred embodiments of the present invention, there is provided an isolated chimeric polypeptide encoding for T23657_P5 (SEQ ID NO:1067), comprising a first amino acid sequence being at least 90% homologous to MPLHQLGDKPLTFPSPNSAMENGLDHTPPSRRASPGTPLSPGSLRSAAHSPLDTSKQPLC QLWAEKHGARGTHEVRYVSAGQSVACGWWAFAPPCLQVLNTPKGILFFLCAAAFLQG MTVNGFINTVITSLERRYDLHSYQSGLIASSYDIAACLCLTFVSYFGGSGHKPRWLGWG VLLMGTGSLVFALPHFTAGRYEVELDAGVRTCPANPGAVCADSTSGLSRYQLVFMLG QFLHGVGATPLYTLGVTYLDENVKSSCSPVYIAIFYTAAILGPAAGYLIGGALLNIYTEM GRRTELTTESPLWVGAWWVGFLGSGAAAFFTAVPILGYPRQLPGSQRYAVMRAAEMH QLKDSSRGEASNPDFGKTIRDLPLSIWLLLKNPTFILLCLAGATEATLITGMSTFSPKFLES QFSLSASEAATLFGYLVVPAGGGGTFLGGFFVNKLRLRGSAVIKFCLFCTVVSLLGILVF SLHCPSVPMAGVTASYGGSLLPEGHLNLTAPCNAACSCQPEHYSPVCGSDGLMYFSLC HAGCPAATETNVDGQKVYRDCSCIPQNLSSGFGHATAGKCTSTCQRKPLLLVFIFVVIFF TFLSSIPALTATLR corresponding to amino acids 1-604 of S21C_HUMAN (SEQ ID NO:1062), which also corresponds to amino acids 1-604 of T23657_P5 (SEQ ID NO:1067).

[0577] According to preferred embodiments of the present invention, there is provided an isolated chimeric polypeptide encoding for T23657_P6 (SEQ ID NO:1068), comprising a first amino acid sequence being at least 90% homologous to MPLHQLGDKPLTFPSPNSAMENGLDHTPPSRRASPGTPLSPGSLRSAAHSPLDTSKQPLC QLWAEKHGARGTHEVRYVSAGQSVACGWWAFAPPCLQVLNTPKGILFFLCAAAFLQG MTVNGFINTVITSLERRYDLHSYQSGLIASSYDIAACLCLTFVSYFGGSGHKPRWLGWG VLLMGTGSLVFALPHFTAGRYEVELDAGVRTCPANPGAVCADSTSGLSRYQLVFMLG QFLHGVGATPLYTLGVTYLDENVKSSCSPVYIAIFYTAAILGPAAGYLIGGALLNIYTEM GRRTELTTESPLWVGAWWVGFLGSGAAAFFTAVPILGYPRQLPGSQRYAVMRAAEMH QLKDSSRGEASNPDFGKTIRDLPLSIWLLLKNPTFILLCLAGATEATLITGMSTFSPKFLES QFSLSASEAATLFGYLVVPAGGGGTFLGGFFVNKLRLRGSAVIKFCLFCTVVSLLGILVF SLHCPSVPMAGVTASYGGSLLPEGHLNLTAPCNAACSCQPEHYSPVCGSDGLMYFSLC HAGCPAATETNVDGQKV corresponding to amino acids 1-547 of S21C_HUMAN (SEQ ID NO:1062), which also corresponds to amino acids 1-547 of T23657_P6 (SEQ ID NO:1068), and a second amino acid sequence being at least 70%, optionally at least 80%, preferably at least 85%, more preferably at least 90% and most preferably at least 95% homologous to a polypeptide having the sequence SGAAAYRPCPPLDPGKGPPCLPLVIGAIVGLPRCTETVAVSLRIFPLVLAMPLQGNALQL VRESPSFWFSYSL (SEQ ID NO:1458) corresponding to amino acids 548-620 of T23657_P6 (SEQ ID NO:1068), wherein said first amino acid sequence and second amino acid sequence are contiguous and in a sequential order.

[0578] According to preferred embodiments of the present invention, there is provided an isolated polypeptide encoding for a tail of T23657_P6 (SEQ ID NO:1068), comprising a polypeptide being at least 70%, optionally at least about 80%, preferably at least about 85%, more preferably at least about 90% and most preferably at least about 95% homologous to the sequence SGAAAYRPCPPLDPGKGPPCLPLVIGAIVGLPRCTETVAVSLRIFPLVLAMPLQGNALQL VRESPSFWFSYSL (SEQ ID NO:1458) in T23657_P6 (SEQ ID NO: 1068).

[0579] According to preferred embodiments of the present invention, there is provided an isolated chimeric polypeptide encoding for T23657_P7 (SEQ ID NO:1069), comprising a first amino acid sequence being at least 90% homologous to MPLHQLGDKPLTFPSPNSAMENGLDHTPPSRRASPGTPLSPGSLRSAAHSPLDTSKQPLC QLWAEKHGARGTHEVRYVSAGQSVACGWWAFAPPCLQVLNTPKGILFFLCAAAFLQG MTVNGFINTVITSLERRYDLHSYQSGLIASSYDIAACLCLTFVSYFGGSGHKPRWLGWG VLLMGTGSLVFALPHFTAGRYEVELDAGVRTCPANPGAVCADSTSGLSRYQLVFMLG QFLHGVGATPLYTLGVTYLDENVKSSCSPVYIAIFYTAAILGPAAGYLIGGALLNIYTEM GRRTELTTESPLWVGAWWVGFLGSGAAAFFTAVPILGYPRQLPGSQRYAVMRAAEMH QLKDSSRGEASNPDFGKTIRDLPLSIWLLLKNPTFILLCLAGATEATLITGMSTFSPKFLES QFSLSASEAATLFGYLVVPAGGGGTFLGGFFVNKLRLRGSAVIKFCLFCTVVSLLGILVF SLHCPSVPMAGVTASYGGSLLPEGHLNLTAPCNAACSCQPEHYSPVCGSDGLMYFSLC HAGCPAATETNVDGQK corresponding to amino acids 1-546 of S21 C_HUMAN (SEQ ID NO:1062), which also corresponds to amino acids 1-546 of T23657_P7 (SEQ ID NO:1069), and a second amino acid sequence being at least 70%, optionally at least 80%, preferably at least 85%, more preferably at least 90% and most preferably at least 95% homologous to a polypeptide having the sequence MCP corresponding to amino acids 547-549 of T23657_P7 (SEQ ID NO:1069), wherein said first amino acid sequence and second amino acid sequence are contiguous and in a sequential order.

[0580] According to preferred embodiments of the present invention, there is provided an isolated chimeric polypeptide encoding for T23657_P8 (SEQ ID NO:1070), comprising a first amino acid sequence being at least 90% homologous to MPLHQLGDKPLTFPSPNSAMENGLDHTPPSRRASPGTPLSPGSLRSAAHSPLDTSKQPLC QLWAEKHGARGTHEVRYVSAGQSVACGWWAFAPPCLQVLNTPKGILFFLCAAAFLQG MTVNGFINTVITSLERRYDLHSYQSGLIASSYDIAACLCLTFVSYFGGSGHKPRWLGWG VLLMGTGSLVFALPHFTAGRYEVELDAGVRTCPANPGAVCADSTSGLSRYQLVFMLG QFLHGVGATPLYTLGVTYLDENVKSSCSPVYIAIFYTAAILGPAAGYLIGGALLNIYTEM GRRTELTTESPLWVGAWWVGFLGSGAAAFFTAVPILGYPRQLPGSQRYAVMRAAEMH QLKDSSRGEASNPDFGKTIRDLPLSIWLLLKNPTFILLCLAGATEATLITGMSTFSPKFLES QFSLSASEAATLFGYLVVPAGGGGTFLGGFFVNKLRLRGSAVIKFCLFCTVVSLLGILVF SLHCPSVPMAGVTASYGGSLLPEGHLNLTAPCNAACSCQPEHYSPVCGSDGLMYFSLC HAGCPAATETNVDGQK corresponding to amino acids 1-546 of S21C_HUMAN (SEQ ID NO:1062), which also corresponds to amino acids 1-546 of T23657_P8 (SEQ ID NO:1070), and a second amino acid sequence being at least 70%, optionally at least 80%, preferably at least 85%, more preferably at least 90% and most preferably at least 95% homologous to a polypeptide having the sequence QHSCTNGNSTMCP (SEQ ID NO:1459) corresponding to amino acids 547-559 of T23657_P8 (SEQ ID NO:1070), wherein said first amino acid sequence and second amino acid sequence are contiguous and in a sequential order.

[0581] According to preferred embodiments of the present invention, there is provided an isolated polypeptide encoding for a tail of T23657_P8 (SEQ ID NO:1070), comprising a polypeptide being at least 70%, optionally at least about 80%, preferably at least about 85%, more preferably at least about 90% and most preferably at least about 95% homologous to the sequence QHSCTNGNSTMCP (SEQ ID NO:1459) in T23657_P8 (SEQ ID NO:1070).

[0582] According to preferred embodiments of the present invention, there is provided an isolated chimeric polypeptide encoding for T23657_P10 (SEQ ID NO:1072), comprising a first amino acid sequence being at least 90% homologous to MPLHQLGDKPLTFPSPNSAMENGLDHTPPSRRASPGTPLSPGSLRSAAHSPLDTSKQPLC QLWAEKHGARGTHEVRYVSAGQSVACGWWAFAPPCLQVLNTPKGILFFLCAAAFLQG MTVNGFINTVITSLERRYDLHSYQSGLIASSYDIAACLCLTFVSYFGGSGHKPRWLGWG VLLMGTGSLVFALPHFTAGRYEVELDAGVRTCPANPGAVCADSTSGLSRYQLVFMLG QFLHGVGATPLYTLGVTYLDENVKSSCSPVYIAIFYTAAILGPAAGYLIGGALLNIYTEM GRRTELTTESPLWVGAWWVGFLGSGAAAFFTAVPILGYPRQLPGSQRYAVMRAAEMH QLKDSSRGEASNPDFGKTIRDLPLSIWLLLKNPTFILLCLAGATEATLITGMSTFSPKFLES QFSLSASEAATLFGYLVVPAGGGGTFLGGFFVNKLRLRGSAVIKFCLFCTVVSLLGILVF SLHCPSVPMAGVTASYGGSLLPEGHLNLTAPCNAACSCQPEHYSPVCGSDGLMYFSLC HAGCPAATETNVDGQKVYRDCSCIPQNLSSGFGHATAGKCTSTCQRKPLLLVFIFVVIFF TFLSSIPALTATLRCVRDPQRSFALGIQWIVVRIL corresponding to amino acids 1-625 of S21C_HUMAN (SEQ ID NO:1062), which also corresponds to amino acids 1-625 of T23657_P10 (SEQ ID NO:1072), a second amino acid sequence being at least 70%, optionally at least 80%, preferably at least 85%, more preferably at least 90% and most preferably at least 95% homologous to a polypeptide having the sequence GTVQCEEAMVSCTVCSLHKGM corresponding to amino acids 626-646 of T23657_P10 (SEQ ID NO:1072), and a third amino acid sequence being at least 90% homologous to GGIPGPIAFGWVIDKACLLWQDQCGQQGSCLVYQNSAMSRYILIMGLLYKVLGVLFFAI ACFLYKPLSESSDGLETCLPSQSSAPDSATDSQLQSSV corresponding to amino acids 626-722 of S21C_HUMAN (SEQ ID NO:1062), which also corresponds to amino acids 647-743 of T23657_P10 (SEQ ID NO:1072), wherein said first amino acid sequence, second amino acid sequence and third amino acid sequence are contiguous and in a sequential order.

[0583] According to preferred embodiments of the present invention, there is provided an isolated polypeptide encoding for an edge portion of T23657_P10 (SEQ ID NO:1072), comprising an amino acid sequence being at least 70%, optionally at least about 80%, preferably at least about 85%, more preferably at least about 90% and most preferably at least about 95% homologous to the sequence encoding for GTVQCEEAMVSCTVCSLHKGM, corresponding to T23657_P10 (SEQ ID NO:1072).

[0584] According to preferred embodiments of the present invention, there is provided an isolated chimeric polypeptide encoding for T23657_P11 (SEQ ID NO:1073), comprising a first amino acid sequence being at least 90% homologous to MPLHQLGDKPLTFPSPNSAMENGLDHTPPSRRASPGTPLSPGSLRSAAHSPLDTSKQPLC QLWAEKHGARGTHEVRYVSAGQSVACGWWAFAPPCLQVLNTPKGILFFLCAAAFLQG MTVNGFINTVITSLERRYDLHSYQSGLIASSYDIAACLCLTFVSYFGGSGHKPRWLGWG VLLMGTGSLVFALPHFTAGRYEVELDAGVRTCPANPGAVCADSTSGLSRYQLVFMLG QFLHGVGATPLYTLGVTYLDENVKSSCSPVYIAIFYTAAILGPAAGYLIGGALLNIYTEM GRRTELTTESPLWVGAWWVGFLGSGAAAFFTAVPILGYPRQLPGSQRYAVMRAAEMH QLKDSSRGEASNPDFGKTIRDLPLSIWLLLKNPTFILLCLAGATEATLITGMSTFSPKFLES QFSLSASEAATLF corresponding to amino acids 1-425 of S21 C_HUMAN (SEQ ID NO:1062), which also corresponds to amino acids 1-425 of T23657_P11 (SEQ ID NO:1073), and a second amino acid sequence being at least 70%, optionally at least 80%, preferably at least 85%, more preferably at least 90% and most preferably at least 95% homologous to a polypeptide having the sequence ASCPKAT (SEQ ID NO:1460) corresponding to amino acids 426-432 of T23657_P11 (SEQ ID NO:1073), wherein said first amino acid sequence and second amino acid sequence are contiguous and in a sequential order.

[0585] According to preferred embodiments of the present invention, there is provided an isolated polypeptide encoding for a tail of T23657_P11 (SEQ ID NO:1073), comprising a polypeptide being at least 70%, optionally at least about 80%, preferably at least about 85%, more preferably at least about 90% and most preferably at least about 95% homologous to the sequence ASCPKAT (SEQ ID NO:1460) in T23657_P11 (SEQ ID NO:1073).

[0586] According to preferred embodiments of the present invention, there is provided an isolated chimeric polypeptide encoding for T23657_P12 (SEQ ID NO:1074), comprising a first amino acid sequence being at least 90% homologous to MPLHQLGDKPLTFPSPNSAMENGLDHTPPSRRASPGTPLSPGSLRSAAHSPLDTSKQPLC QLWAEKHGARGTHEVRYVSAGQSVACGWWAFAPPCLQVLNTPKGILFFLCAAAFLQG MTVNGFINTVITSLERRYDLHSYQSGLIASSYDIAACLCLTFVSYFGGSGHKPRWLGWG VLLMGTGSLVFALPHFTAGRYEVELDAGVRTCPANPGAVCADSTSGLSRYQLVFMLG QFLHGVGATPLYTLGVTYLDENVKSSCSPVYIAIFYTAAILGPAAGYLIGGALLNIYTEM GRRTELTTESPLWVGAWWVGFLGSGAAAFFTAVPILGYPRQLPGSQRYAVMRAAEMH QLKDSSRGEASNPDFGKTIRDLPLSIWLLLKNPTFILLCLAGATEATLITGMSTFSPKFLES QFSLSASEAATLFGYLVVPAGGGGTFLGGFFVNKLRLRGSAVIKFCLFCTVVSLLGILVF SLHCPSVPMAGVTASYGGSLLPEGHLNLTAPCNAACSCQPEHYSPVCGSDGLMYFSLC HAGCPAATETNVDGQKVYRDCSCIPQNLSSGFGHATAGKCTSTCQRKPLLLVFIFVVIFF TFLSSIPALTATLRCVRDPQRSFALGIQWIVVRILGGIPGPIAFGWVIDKACLLWQDQCG QQGSCLVYQNSAMSRYILIMGLLYK corresponding to amino acids 1-675 of S21C_HUMAN (SEQ ID NO:1062), which also corresponds to amino acids 1-675 of T23657_P12 (SEQ ID NO:1074), and a second amino acid sequence being at least 70%, optionally at least 80%, preferably at least 85%, more preferably at least 90% and most preferably at least 95% homologous to a polypeptide having the sequence EEENEFRRL (SEQ ID NO:1461) corresponding to amino acids 676-684 of T23657_P12 (SEQ ID NO:1074), wherein said first amino acid sequence and second amino acid sequence are contiguous and in a sequential order.

[0587] According to preferred embodiments of the present invention, there is provided an isolated polypeptide encoding for a tail of T23657_P12 (SEQ ID NO:1074), comprising a polypeptide being at least 70%, optionally at least about 80%, preferably at least about 85%, more preferably at least about 90% and most preferably at least about 95% homologous to the sequence EEENEFRRL (SEQ ID NO:1461) in T23657_P12 (SEQ ID NO:1074).

[0588] According to preferred embodiments of the present invention, there is provided an isolated chimeric polypeptide encoding for T23657_P16 (SEQ ID NO:1075), comprising a first amino acid sequence being at least 70%, optionally at least 80%, preferably at least 85%, more preferably at least 90% and most preferably at least 95% homologous to a polypeptide having the sequence MGTSPMADPVPAGRQHGSGLDPTTRLSPLC (SEQ ID NO:1462) corresponding to amino acids 1-30 of T23657_P16 (SEQ ID NO:1075), and a second amino acid sequence being at least 90% homologous to SLLPEGHLNLTAPCNAACSCQPEHYSPVCGSDGLMYFSLCHAGCPAATETNVDGQKVY RDCSCIPQNLSSGFGHATAGKCTSTCQRKPLLLVFIFVVIFFTFLSSIPALTATLRCVRDPQ RSFALGIQWIVVRILGGIPGPIAFGWVIDKACLLWQDQCGQQGSCLVYQNSAMSRYILI MGLLYKVLGVLFFAIACFLYKPLSESSDGLETCLPSQSSAPDSATDSQLQSSV corresponding to amino acids 491-722 of S21 C_HUMAN (SEQ ID NO:1062), which also corresponds to amino acids 31-262 of T23657_P16 (SEQ ID NO:1075), wherein said first amino acid sequence and second amino acid sequence are contiguous and in a sequential order.

[0589] According to preferred embodiments of the present invention, there is provided an isolated polypeptide encoding for a head of T23657_P16 (SEQ ID NO:1075), comprising a polypeptide being at least 70%, optionally at least about 80%, preferably at least about 85%, more preferably at least about 90% and most preferably at least about 95% homologous to the sequence MGTSPMADPVPAGRQHGSGLDPTTRLSPLC (SEQ ID NO:1462) of T23657_P16 (SEQ ID NO:1075).

[0590] According to preferred embodiments of the present invention, there is provided an isolated chimeric polypeptide encoding for T23657_P17 (SEQ ID NO:1076), comprising a first amino acid sequence being at least 90% homologous to MYFSLCHAGCPAATETNVDGQKVYRDCSCIPQNLSSGFGHATAGKCTSTCQRKPLLLV FIFVVIFFTFLSSIPALTATLRCVRDPQRSFALGIQWIVVRILGGIPGPIAFGWVIDKACLL WQDQCGQQGSCLVYQNSAMSRYILIMGLLYKVLGVLFFAIACFLYKPLSESSDGLETCL PSQSSAPDSATDSQLQSSV corresponding to amino acids 525-722 of S21C_HUMAN (SEQ ID NO:1062), which also corresponds to amino acids 1-198 of T23657_P17 (SEQ ID NO:1076).

[0591] According to preferred embodiments of the present invention, there is provided an isolated chimeric polypeptide encoding for T23657_P21 (SEQ ID NO:1078), comprising a first amino acid sequence being at least 70%, optionally at least 80%, preferably at least 85%, more preferably at least 90% and most preferably at least 95% homologous to a polypeptide having the sequence MWTAR (SEQ ID NO:1463) corresponding to amino acids 1-5 of T23657_P21 (SEQ ID NO:1078), and a second amino acid sequence being at least 90% homologous to RCVRDPQRSFALGIQWIVVRILGGIPGPIAFGWVIDKACLLWQDQCGQQGSCLVYQNSA MSRYILIMGLLYKVLGVLFFAIACFLYKPLSESSDGLETCLPSQSSAPDSATDSQLQSSV corresponding to amino acids 604-722 of S21C_HUMAN (SEQ ID NO:1062), which also corresponds to amino acids 6-124 of T23657_P21 (SEQ ID NO:1078), wherein said first amino acid sequence and second amino acid sequence are contiguous and in a sequential order.

[0592] According to preferred embodiments of the present invention, there is provided an isolated polypeptide encoding for a head of T23657_P21 (SEQ ID NO:1078), comprising a polypeptide being at least 70%, optionally at least about 80%, preferably at least about 85%, more preferably at least about 90% and most preferably at least about 95% homologous to the sequence MWTAR (SEQ ID NO:1463) of T23657_P21 (SEQ ID NO:1078).

[0593] According to preferred embodiments of the present invention, there is provided an isolated chimeric polypeptide encoding for T23657_P23 (SEQ ID NO:1080), comprising a first amino acid sequence being at least 90% homologous to MPLHQLGDKPLTFPSPNSAMENGLDHTPPSRRASPGTPLSPGSLRSAAHSPLDTSKQPLC QLWAEKHGARGTHEVRYVSAGQSVACGWWAFAPPCLQVLNTPKGILFFLCAAAFLQG MTVNGFINTVITSLERRYDLHSYQSGLIASSYDIAACLCLTFVSYFGGSGHKPRWLGWG VLLMGTGSLVFALPHFTAGRYEVELDAGVRTCPANPGAVCADSTSGLSRYQLVFMLG QFLHGVGATPLYTLGVTYLDENVKSSCSPVYIAIFYTAAILGPAAGYLIGGALLNIYTEM GRRTELTTESPLWVGAWWVGFLGSGAAAFFTAVPILGYPRQLPGSQRYAVMRAAEMH QLKDSSRGEASNPDFGKTIRDLPLSIWLLLKNPTFILLCLAGATEATLITGMSTFSPKFLES QFSLSASEAATLFGYLVVPAGGGGTFLGGFFVNKLRLRGSAVIKFCLFCTVVSLLGILVF SLHCPSVPMAGVTASYGGSLLPEGHLNLTAPCNAACSCQPEHYSPVCGSDGLMYFSLC HAGCPAATETNVDGQKV corresponding to amino acids 1-547 of S21 C_HUMAN (SEQ ID NO:1062), which also corresponds to amino acids 1-547 of T23657_P23 (SEQ ID NO:1080), and a second amino acid sequence being at least 70%, optionally at least 80%, preferably at least 85%, more preferably at least 90% and most preferably at least 95% homologous to a polypeptide having the sequence SGAAAYRPCPPLDPGKGPPCLPLVIGAIVGLPRCTETVAVSLRIFPLVLAMHCREMHFNL SEKAPPSGFHIRCNFLYIPQQHSCTNGNSTVSWGRVCACPELSLQHPEAELCRS (SEQ ID NO:1464) corresponding to amino acids 548-661 of T23657_P23 (SEQ ID NO:1080), wherein said first amino acid sequence and second amino acid sequence are contiguous and in a sequential order.

[0594] According to preferred embodiments of the present invention, there is provided an isolated polypeptide encoding for a tail of T23657_P23 (SEQ ID NO:1080), comprising a polypeptide being at least 70%, optionally at least about 80%, preferably at least about 85%, more preferably at least about 90% and most preferably at least about 95% homologous to the sequence SGAAAYRPCPPLDPGKGPPCLPLVIGAIVGLPRCTETVAVSLRIFPLVLAMHCREMHFNL SEKAPPSGFHIRCNFLYIPQQHSCTNGNSTVSWGRVCACPELSLQHPEAELCRS (SEQ ID NO:1464) in T23657_P23 (SEQ ID NO:1080).

[0595] According to preferred embodiments of the present invention, there is provided an isolated chimeric polypeptide encoding for R30650_PEA_{—}2_P4 (SEQ ID NO:991), comprising a first amino acid sequence being at least 90% homologous to MYLHIGEEIDGVDMRAEVGLLSRNIIVMGEMEDKCYPYRNHICNFFDFDTFGGHIKFAL GFKAAHLEGTELKHMGQQLVGQYPIHFHLAGDVDERGGYDPPTYIRDLSIHHTFSRCVT VHGSNGLLIKDVVGYNSLGHCFFTEDGPEERNTFDHCLGLLVKSGTLLPSDRDSKMCK MITEDSYPGYIPKPRQDCNAVSTFWMANPNNNLINCAAAGSEETGFWFIFHHVPTGPSV GMYSPGYSEHIPLGKFYNNRAHSNYRAGMIIDNGVKTTEASAKDKRPFLSIISARYSPHQ DADPLKPREPAIIRHFIAYKNQDHGAWLRGGDVWLDSCRFADNGIGLTLASGGTFPYD DGSKQEIKNSLFVGESGNVGTEMMDNRIWGPGGLDHSGRTLPIGQNFPIRGIQLYDGPIN IQNCTFRKFVALEGRHTSALAFRLNNAWQSCPHNNVTGIAFEDVPITSRVFFGEPGPWF NQLDMDGDKTSVFHDVDGSVSEYPGSYLTKNDNWLVRHPDCINVPDWRGAICSGCYA QMYIQAYKTSNLRMKIIKNDFPSHPLYLEGALTRSTHYQQYQPVVTLQKGYTIHWDQT APAELAIWLINFNKGDWIRVGLCYPRGTTFSILSDVHNRLLKQTSKTGVFVRTLQMDKV EQSYPGRSHYYWDEDSGLLFLKLKAQNEREKFAFCSMKGCERIKIKALIPKNAGVSDCT ATAYPKFTERAVVDVPMPKKLFGSQLKTKDHFLEVKMESSKQHFFHLWNDFAYIEVD GKKYPSSEDGIQVVVIDGNQGRVVSHTSFRNSILQGIPWQLFNYVATIPDNSIVLMASKG RYVSRGPWTRVLEKLGADRGLKLKEQMAFVGFKGSFRPIWVTLDTEDHKAKIFQVVPI PVVKKKKL corresponding to amino acids 126-1013 of Q9ULM1 (SEQ ID NO:989), which also corresponds to amino acids 1-888 of R30650_PEA_{—}2_P4 (SEQ ID NO:991).

[0596] According to preferred embodiments of the present invention, there is provided an isolated chimeric polypeptide encoding for R30650_PEA_{—}2_P4 (SEQ ID NO:991), comprising a first amino acid sequence being at least 90% homologous to MYLHIGEEIDGVDMRAEVGLLSRNIIVMGEMEDKCYPYRNHICNFFDFDTFGGHIKFAL GFKAAHLEGTELKHMGQQLVGQYPIHFHLAGDVDERGGYDPPTYIRDLSIHHTFSRCVT VHGSNGLLIKDVVGYNSLGHCFFTEDGPEERNTFDHCLGLLVKSGTLLPSDRDSKMCK MITEDSYPGYIPKPRQDCNAVSTFWMANPNNNLINCAAAGSEETGFWFIFHHVPTGPSV GMYSPGYSEHIPLGKFYNNRAHSNYRAGMIIDNGVKTTEASAKDKRPFLSIISARYSPHQ DADPLKPREPAIIRHFIAYKNQDHGAWLRGGDVWLDSCRFADNGIGLTLASGGTFPYD DGSKQEIKNSLFVGESGNVGTEMMDNRIWGPGGLDHSGRTLPIGQNFPIRGIQLYDGPIN IQNCTFRKFVALEGRHTSALAFRLNNAWQSCPHNNVTGIAFEDVPITSRVFFGEPGPWF NQLDMDGDKTSVFHDVDGSVSEYPGSYLTKND corresponding to amino acids 474-977 of Q8WUJ3 (SEQ ID NO:987), which also corresponds to amino acids 1-504 of R30650_PEA_{—}2_P4 (SEQ ID NO:991), and a second amino acid sequence being at least 70%, optionally at least 80%, preferably at least 85%, more preferably at least 90% and most preferably at least 95% homologous to a polypeptide having the sequence NWLVRHPDCINVPDWRGAICSGCYAQMYIQAYKTSNLRMKIIKNDFPSHPLYLEGALT RSTHYQQYQPVVTLQKGYTIHWDQTAPAELAIWLINFNKGDWIRVGLCYPRGTTFSILS DVHNRLLKQTSKTGVFVRTLQMDKVEQSYPGRSHYYWDEDSGLLFLKLKAQNEREKF AFCSMKGCERIKIKALIPKNAGVSDCTATAYPKFTERAVVDVPMPKKLFGSQLKTKDHF LEVKMESSKQHFFHLWNDFAYIEVDGKKYPSSEDGIQVVVIDGNQGRVVSHTSFRNSIL QGIPWQLFNYVATIPDNSIVLMASKGRYVSRGPWTRVLEKLGADRGLKLKEQMAFVGF KGSFRPIWVTLDTEDHKAKIFQVVPIPVVKKKKL (SEQ ID NO:1465) corresponding to amino acids 505-888 of R30650_PEA_{—}2_P4 (SEQ ID NO:991), wherein said first amino acid sequence and second amino acid sequence are contiguous and in a sequential order.

[0597] According to preferred embodiments of the present invention, there is provided an isolated polypeptide encoding for a tail of R30650_PEA_{—}2_P4 (SEQ ID NO:991), comprising a polypeptide being at least 70%, optionally at least about 80%, preferably at least about 85%, more preferably at least about 90% and most preferably at least about 95% homologous to the sequence NWLVRHPDCINVPDWRGAICSGCYAQMYIQAYKTSNLRMKIIKNDFPSHPLYLEGALT RSTHYQQYQPVVTLQKGYTIHWDQTAPAELAIWLINFNKGDWIRVGLCYPRGTTFSILS DVHNRLLKQTSKTGVFVRTLQMDKVEQSYPGRSHYYWDEDSGLLFLKLKAQNEREKF AFCSMKGCERIKIKALIPKNAGVSDCTATAYPKFTERAVVDVPMPKKLFGSQLKTKDHF LEVKMESSKQHFFHLWNDFAYIEVDGKKYPSSEDGIQVVVIDGNQGRVVSHTSFRNSIL QGIPWQLFNYVATIPDNSIVLMASKGRYVSRGPWTRVLEKLGADRGLKLKEQMAFVGF KGSFRPIWVTLDTEDHKAKIFQVVPIPVVKKKKL (SEQ ID NO:1465) in R30650_PEA_{—}2_P4 (SEQ ID NO:991).

[0598] According to preferred embodiments of the present invention, there is provided an isolated chimeric polypeptide encoding for R30650_PEA_{—}2_P4 (SEQ ID NO:991), comprising a first amino acid sequence being at least 70%, optionally at least 80%, preferably at least 85%, more preferably at least 90% and most preferably at least 95% homologous to a polypeptide having the sequence MYLHIGEEIDGVDMRAEVGLLSRNIIVMGEMEDKCYPYRNHICNFFDFDTFGGHIKFAL GFKAAHLEGTELKHMGQQLVGQYPIHFHLAGD (SEQ ID NO:1466) corresponding to amino acids 1-91 of R30650_PEA_{—}2_P4 (SEQ ID NO:991), and a second amino acid sequence being at least 90% homologous to VDERGGYDPPTYIRDLSIHHTFSRCVTVHGSNGLLIKDVVGYNSLGHCFFTEDGPEERNT FDHCLGLLVKSGTLLPSDRDSKMCKMITEDSYPGYIPKPRQDCNAVSTFWMANPNNNL INCAAAGSEETGFWFIFHHVPTGPSVGMYSPGYSEHIPLGKFYNNRAHSNYRAGMIIDN GVKTTEASAKDKRPFLSIISARYSPHQDADPLKPREPAIIRHFIAYKNQDHGAWLRGGDV WLDSCRFADNGIGLTLASGGTFPYDDGSKQEIKNSLFVGESGNVGTEMMDNRIWGPGG LDHSGRTLPIGQNFPIRGIQLYDGPINIQNCTFRKFVALEGRHTSALAFRLNNAWQSCPH NNVTGIAFEDVPITSRVFFGEPGPWFNQLDMDGDKTSVFHDVDGSVSEYPGSYLTKND NWLVRHPDCINVPDWRGAICSGCYAQMYIQAYKTSNLRMKIIKNDFPSHPLYLEGALT RSTHYQQYQPVVTLQKGYTIHWDQTAPAELAIWLINFNKGDWIRVGLCYPRGTTFSILS DVHNRLLKQTSKTGVFVRTLQMDKVEQSYPGRSHYYWDEDSGLLFLKLKAQNEREKF AFCSMKGCERIKIKALIPKNAGVSDCTATAYPKFTERAVVDVPMPKKLFGSQLKTKDHF LEVKMESSKQHFFHLWNDFAYIEVDGKKYPSSEDGIQVVVIDGNQGRVVSHTSFRNSIL QGIPWQLFNYVATIPDNSIVLMASKGRYVSRGPWTRVLEKLGADRGLKLKEQMAFVGF KGSFRPIWVTLDTEDHKAKIFQVVPIPVVKKKKL corresponding to amino acids 8-804 of Q9NPN9 (SEQ ID NO:988), which also corresponds to amino acids 92-888 of R30650_PEA_{—}2_P4 (SEQ ID NO:991), wherein said first amino acid sequence and second amino acid sequence are contiguous and in a sequential order.

[0599] According to preferred embodiments of the present invention, there is provided an isolated polypeptide encoding for a head of R30650_PEA_{—}2_P4 (SEQ ID NO:991), comprising a polypeptide being at least 70%, optionally at least about 80%, preferably at least about 85%, more preferably at least about 90% and most preferably at least about 95% homologous to the sequence MYLHIGEEIDGVDMRAEVGLLSRNIIVMGEMEDKCYPYRNHICNFFDFDTFGGHIKFAL GFKAAHLEGTELKHMGQQLVGQYPIHFHLAGD (SEQ ID NO:1466) of R30650_PEA_{—}2_P4 (SEQ ID NO:991).

[0600] According to preferred embodiments of the present invention, there is provided an isolated chimeric polypeptide encoding for R30650_PEA_{—}2_P4 (SEQ ID NO:991), comprising a first amino acid sequence being at least 70%, optionally at least 80%, preferably at least 85%, more preferably at least 90% and most preferably at least 95% homologous to a polypeptide having the sequence MYLHIGEEIDGVDMRAEVGLLSRNIIVMGEMEDKCYPYRNHICNFFDFDTFGGHIKFAL GFKAAHLEGTELKHMGQQLVGQYPIHFHLAGDVDERGGYDPPTYIRDLSIHHTFSRCVT VHGSNGLLIKDVVGYNSLGHCFFTEDGPEERNTFDHCLGLLVKSGTLLPSDRDSKMCK MITEDSYPGYIPKPRQDCNAVSTFWMANPNNNLINCAAAGSEETGFWFIFHHVPTGPSV GMYSPGYSEHIPLGKFYNNRAHSNYRAGMIIDNGVKTTEASAKDKRPFLSIISARYSPHQ DADPLKPREPAIIRHFIAYKNQDHGAWLRGGDVWLDSCRFADNGIGLTLASGGTFPYD DGSKQEIKNSLFVGESGNVGTEMMDNRIWGPGGLDH corresponding to amino acids 1-389 of R30650_PEA_{—}2_P4 (SEQ ID NO:991), and a second amino acid sequence being at least 90% homologous to SGRTLPIGQNFPIRGIQLYDGPINIQNCTFRKFVALEGRHTSALAFRLNNAWQSCPHNNV TGIAFEDVPITSRVFFGEPGPWFNQLDMDGDKTSVFHDVDGSVSEYPGSYLTKNDNWL VRHPDCINVPDWRGAICSGCYAQMYIQAYKTSNLRMKIIKNDFPSHPLYLEGALTRSTH YQQYQPVVTLQKGYTIHWDQTAPAELAIWLINFNKGDWIRVGLCYPRGTTFSILSDVH NRLLKQTSKTGVFVRTLQMDKVEQSYPGRSHYYWDEDSGLLFLKLKAQNEREKFAFC SMKGCERIKIKALIPKNAGVSDCTATAYPKFTERAVVDVPMPKKLFGSQLKTKDHFLEV KMESSKQHFFHLWNDFAYIEVDGKKYPSSEDGIQVVVIDGNQGRVVSHTSFRNSILQGI PWQLFNYVATIPDNSIVLMASKGRYVSRGPWTRVLEKLGADRGLKLKEQMAFVGFKG SFRPIWVTLDTEDHKAKIFQVVPIPVVKKKKL corresponding to amino acids 2-500 of Q9H1K5 (SEQ ID NO:990), which also corresponds to amino acids 390-888 of R30650_PEA_{—}2_P4 (SEQ ID NO:991), wherein said first amino acid sequence and second amino acid sequence are contiguous and in a sequential order.

[0601] According to preferred embodiments of the present invention, there is provided an isolated polypeptide encoding for a head of R30650_PEA_{—}2_P4 (SEQ ID NO:991), comprising a polypeptide being at least 70%, optionally at least about 80%, preferably at least about 85%, more preferably at least about 90% and most preferably at least about 95% homologous to the sequence MYLHIGEEIDGVDMRAEVGLLSRNIIVMGEMEDKCYPYRNHICNFFDFDTFGGHIKFAL GFKAAHLEGTELKHMGQQLVGQYPIHFHLAGDVDERGGYDPPTYIRDLSIHHTFSRCVT VHGSNGLLIKDVVGYNSLGHCFFTEDGPEERNTFDHCLGLLVKSGTLLPSDRDSKMCK MITEDSYPGYIPKPRQDCNAVSTFWMANPNNNLINCAAAGSEETGFWFIFHHVPTGPSV GMYSPGYSEHIPLGKFYNNRAHSNYRAGMIIDNGVKTTEASAKDKRPFLSIISARYSPHQ DADPLKPREPAIIRHFIAYKNQDHGAWLRGGDVWLDSCRFADNGIGLTLASGGTFPYD DGSKQEIKNSLFVGESGNVGTEMMDNRIWGPGGLDH of R30650_PEA_{—}2_P4 (SEQ ID NO:991).

[0602] According to preferred embodiments of the present invention, there is provided an isolated chimeric polypeptide encoding for R30650_PEA_{—}2_P5 (SEQ ID NO:992), comprising a first amino acid sequence being at least 90% homologous to MDGVNLSTEVVYKKGQDYRFACYDRGRACRSYRVRFLCGKPVRPKLTVTIDTNVNSTI LNLEDNVQSWKPGDTLVIASTDYSMYQAEEFQVLPCRSCAPNQVKVAGKPMYLHIGEE IDGVDMRAEVGLLSRNIIVMGEMEDKCYPYRNHICNFFDFDTFGGHIKFALGFKAAHLE GTELKHMGQQLVGQYPIHFHLAGDVDERGGYDPPTYIRDLSIHHTFSRCVTVHGSNGLL IKDVVGYNSLGHCFFTEDGPEERNTFDHCLGLLVKSGTLLPSDRDSKMCKMITEDSYPG YIPKPRQDCNAVSTFWMANPNNNLINCAAAGSEETGFWFIFHHVPTGPSVGMYSPGYS EHIPLGKFYNNRAHSNYRAGMIIDNGVKTTEASAKDKRPFLSIISARYSPHQDADPLKPR EPAIIRHFIAYKNQDHGAWLRGGDVWLDSCRFADNGIGLTLASGGTFPYDDGSKQEIKN SLFVGESGNVGTEMMDNRIWGPGGLDHSGRTLPIGQNFPIRGIQLYDGPINIQNCTFRKF VALEGRHTSALAFRLNNAWQSCPHNNVTGIAFEDVPITSRVFFGEPGPWFNQLDMDGD KTSVFHDVDGSVSEYPGSYLTKNDNWLVRHPDCINVPDWRGAICSGCYAQMYIQAYK TSNLRMKIIKNDFPSHPLYLEGALTRSTHYQQYQPVVTLQKGYTIHWDQTAPAELAIWL INFNKGDWIRVGLCYPRGTTFSILSDVHNRLLKQTSKTGVFVRTLQMDKVEQSYPGRSH YYWDEDSGLLFLKLKAQNEREKFAFCSMKGCERIKIKALIPKNAGVSDCTATAYPKFTE RAVVDVPMPKKLFGSQLKTKDHFLEVKMESSKQHFFHLWNDFAYIEVDGKKYPSSED GIQVVVIDGNQGRVVSHTSFRNSILQGIPWQLFNYVATIPDNSIVLMASKGRYVSRGPW TRVLEKLGADRGLKLKEQMAFVGFKGSFRPIWVTLDTEDHKAKIFQVVPIPVVKKKKL corresponding to amino acids 18-1013 of Q9ULM1 (SEQ ID NO:989), which also corresponds to amino acids 1-996 of R30650_PEA_{—}2_P5 (SEQ ID NO:992).

[0603] According to preferred embodiments of the present invention, there is provided an isolated chimeric polypeptide encoding for R30650_PEA_{—}2_P5 (SEQ ID NO:992), comprising a first amino acid sequence being at least 90% homologous to MDGVNLSTEVVYKKGQDYRFACYDRGRACRSYRVRFLCGKPVRPKLTVTIDTNVNSTI LNLEDNVQSWKPGDTLVIASTDYSMYQAEEFQVLPCRSCAPNQVKVAGKPMYLHIGEE IDGVDMRAEVGLLSRNIIVMGEMEDKCYPYRNHICNFFDFDTFGGHIKFALGFKAAHLE GTELKHMGQQLVGQYPIHFHLAGDVDERGGYDPPTYIRDLSIHHTFSRCVTVHGSNGLL IKDVVGYNSLGHCFFTEDGPEERNTFDHCLGLLVKSGTLLPSDRDSKMCKMITEDSYPG YIPKPRQDCNAVSTFWMANPNNNLINCAAAGSEETGFWFIFHHVPTGPSVGMYSPGYS EHIPLGKFYNNRAHSNYRAGMIIDNGVKTTEASAKDKRPFLSIISARYSPHQDADPLKPR EPAIIRHFIAYKNQDHGAWLRGGDVWLDSCRFADNGIGLTLASGGTFPYDDGSKQEIKN SLFVGESGNVGTEMMDNRIWGPGGLDHSGRTLPIGQNFPIRGIQLYDGPINIQNCTFRKF VALEGRHTSALAFRLNNAWQSCPHNNVTGIAFEDVPITSRVFFGEPGPWFNQLDMDGD KTSVFHDVDGSVSEYPGSYLTKND corresponding to amino acids 366-977 of Q8WUJ3 (SEQ ID NO:987), which also corresponds to amino acids 1-612 of R30650_PEA_{—}2_P5 (SEQ ID NO:992), and a second amino acid sequence being at least 70%, optionally at least 80%, preferably at least 85%, more preferably at least 90% and most preferably at least 95% homologous to a polypeptide having the sequence NWLVRHPDCINVPDWRGAICSGCYAQMYIQAYKTSNLRMKIIKNDFPSHPLYLEGALT RSTHYQQYQPVVTLQKGYTIHWDQTAPAELAIWLINFNKGDWIRVGLCYPRGTTFSILS DVHNRLLKQTSKTGVFVRTLQMDKVEQSYPGRSHYYWDEDSGLLFLKLKAQNEREKF AFCSMKGCERIKIKALIPKNAGVSDCTATAYPKFTERAVVDVPMPKKLFGSQLKTKDHF LEVKMESSKQHFFHLWNDFAYIEVDGKKYPSSEDGIQVVVIDGNQGRVVSHTSFRNSIL QGIPWQLFNYVATIPDNSIVLMASKGRYVSRGPWTRVLEKLGADRGLKLKEQMAFVGF KGSFRPIWVTLDTEDHKAKIFQVVPIPVVKKKKL (SEQ ID NO:1465) corresponding to amino acids 613-996 of R30650_PEA_{—}2_P5 (SEQ ID NO:992), wherein said first amino acid sequence and second amino acid sequence are contiguous and in a sequential order.

[0604] According to preferred embodiments of the present invention, there is provided an isolated polypeptide encoding for a tail of R30650_PEA_{—}2_P5 (SEQ ID NO:992), comprising a polypeptide being at least 70%, optionally at least about 80%, preferably at least about 85%, more preferably at least about 90% and most preferably at least about 95% homologous to the sequence NWLVRHPDCINVPDWRGAICSGCYAQMYIQAYKTSNLRMKIIKNDFPSHPLYLEGALT RSTHYQQYQPVVTLQKGYTIHWDQTAPAELAIWLINFNKGDWIRVGLCYPRGTTFSILS DVHNRLLKQTSKTGVFVRTLQMDKVEQSYPGRSHYYWDEDSGLLFLKLKAQNEREKF AFCSMKGCERIKIKALIPKNAGVSDCTATAYPKFTERAVVDVPMPKKLFGSQLKTKDHF LEVKMESSKQHFFHLWNDFAYIEVDGKKYPSSEDGIQVVVIDGNQGRVVSHTSFRNSIL QGIPWQLFNYVATIPDNSIVLMASKGRYVSRGPWTRVLEKLGADRGLKLKEQMAFVGF KGSFRPIWVTLDTEDHKAKIFQVVPIPVVKKKKL (SEQ ID NO:1465) in R30650_PEA_{—}2_P5 (SEQ ID NO:992).

[0605] According to preferred embodiments of the present invention, there is provided an isolated chimeric polypeptide encoding for R30650_PEA_{—}2_P5 (SEQ ID NO:992), comprising a first amino acid sequence being at least 70%, optionally at least 80%, preferably at least 85%, more preferably at least 90% and most preferably at least 95% homologous to a polypeptide having the sequence MDGVNLSTEVVYKKGQDYRFACYDRGRACRSYRVRFLCGKPVRPKLTVTIDTNVNSTI LNLEDNVQSWKPGDTLVIASTDYSMYQAEEFQVLPCRSCAPNQVKVAGKPMYLHIGEE IDGVDMRAEVGLLSRNIIVMGEMEDKCYPYRNHICNFFDFDTFGGHIKFALGFKAAHLE GTELKHMGQQLVGQYPIHFHLAGD (SEQ ID NO:1468) corresponding to amino acids 1-199 of R30650_PEA_{—}2_P5 (SEQ ID NO:992), and a second amino acid sequence being at least 90% homologous to VDERGGYDPPTYIRDLSIHHTFSRCVTVHGSNGLLIKDVVGYNSLGHCFFTEDGPEERNT FDHCLGLLVKSGTLLPSDRDSKMCKMITEDSYPGYIPKPRQDCNAVSTFWMANPNNNL INCAAAGSEETGFWFIFHHVPTGPSVGMYSPGYSEHIPLGKFYNNRAHSNYRAGMIIDN GVKTTEASAKDKRPFLSIISARYSPHQDADPLKPREPAIIRHFIAYKNQDHGAWLRGGDV WLDSCRFADNGIGLTLASGGTFPYDDGSKQEIKNSLFVGESGNVGTEMMDNRIWGPGG LDHSGRTLPIGQNFPIRGIQLYDGPINIQNCTFRKFVALEGRHTSALAFRLNNAWQSCPH NNVTGIAFEDVPITSRVFFGEPGPWFNQLDMDGDKTSVFHDVDGSVSEYPGSYLTKND NWLVRHPDCINVPDWRGAICSGCYAQMYIQAYKTSNLRMKIIKNDFPSHPLYLEGALT RSTHYQQYQPVVTLQKGYTIHWDQTAPAELAIWLINFNKGDWIRVGLCYPRGTTFSILS DVHNRLLKQTSKTGVFVRTLQMDKVEQSYPGRSHYYWDEDSGLLFLKLKAQNEREKF AFCSMKGCERIKIKALIPKNAGVSDCTATAYPKFTERAVVDVPMPKKLFGSQLKTKDHF LEVKMESSKQHFFHLWNDFAYIEVDGKKYPSSEDGIQVVVIDGNQGRVVSHTSFRNSIL QGIPWQLFNYVATIPDNSIVLMASKGRYVSRGPWTRVLEKLGADRGLKLKEQMAFVGF KGSFRPIWVTLDTEDHKAKIFQVVPIPVVKKKKL corresponding to amino acids 8-804 of Q9NPN9 (SEQ ID NO:988), which also corresponds to amino acids 200-996 of R30650_PEA_{—}2_P5 (SEQ ID NO:992), wherein said first amino acid sequence and second amino acid sequence are contiguous and in a sequential order.

[0606] According to preferred embodiments of the present invention, there is provided an isolated polypeptide encoding for a head of R30650_PEA_{—}2_P5 (SEQ ID NO:992), comprising a polypeptide being at least 70%, optionally at least about 80%, preferably at least about 85%, more preferably at least about 90% and most preferably at least about 95% homologous to the sequence MDGVNLSTEVVYKKGQDYRFACYDRGRACRSYRVRFLCGKPVRPKLTVTIDTNVNSTI LNLEDNVQSWKPGDTLVIASTDYSMYQAEEFQVLPCRSCAPNQVKVAGKPMYLHIGEE IDGVDMRAEVGLLSRNIIVMGEMEDKCYPYRNHICNFFDFDTFGGHIKFALGFKAAHLE GTELKHMGQQLVGQYPIHFHLAGD (SEQ ID NO:1468) of R30650_PEA_{—}2_P5 (SEQ ID NO:992).

[0607] According to preferred embodiments of the present invention, there is provided an isolated chimeric polypeptide encoding for R30650_PEA_{—}2_P5 (SEQ ID NO:992), comprising a first amino acid sequence being at least 70%, optionally at least 80%, preferably at least 85%, more preferably at least 90% and most preferably at least 95% homologous to a polypeptide having the sequence MDGVNLSTEVVYKKGQDYRFACYDRGRACRSYRVRFLCGKPVRPKLTVTIDTNVNSTI LNLEDNVQSWKPGDTLVIASTDYSMYQAEEFQVLPCRSCAPNQVKVAGKPMYLHIGEE IDGVDMRAEVGLLSRNIIVMGEMEDKCYPYRNHICNFFDFDTFGGHIKFALGFKAAHLE GTELKHMGQQLVGQYPIHFHLAGDVDERGGYDPPTYIRDLSIHHTFSRCVTVHGSNGLL IKDVVGYNSLGHCFFTEDGPEERNTFDHCLGLLVKSGTLLPSDRDSKMCKMITEDSYPG YIPKPRQDCNAVSTFWMANPNNNLINCAAAGSEETGFWFIFHHVPTGPSVGMYSPGYS EHIPLGKFYNNRAHSNYRAGMIIDNGVKTTEASAKDKRPFLSIISARYSPHQDADPLKPR EPAIIRHFIAYKNQDHGAWLRGGDVWLDSCRFADNGIGLTLASGGTFPYDDGSKQEIKN SLFVGESGNVGTEMMDNRIWGPGGLDH corresponding to amino acids 1-497 of R30650_PEA_{—}2_P5 (SEQ ID NO:992), and a second amino acid sequence being at least 90% homologous to SGRTLPIGQNFPIRGIQLYDGPINIQNCTFRKFVALEGRHTSALAFRLNNAWQSCPHNNV TGIAFEDVPITSRVFFGEPGPWFNQLDMDGDKTSVFHDVDGSVSEYPGSYLTKNDNWL VRHPDCINVPDWRGAICSGCYAQMYIQAYKTSNLRMKIIKNDFPSHPLYLEGALTRSTH YQQYQPVVTLQKGYTIHWDQTAPAELAIWLINFNKGDWIRVGLCYPRGTTFSILSDVH NRLLKQTSKTGVFVRTLQMDKVEQSYPGRSHYYWDEDSGLLFLKLKAQNEREKFAFC SMKGCERIKIKALIPKNAGVSDCTATAYPKFTERAVVDVPMPKKLFGSQLKTKDHFLEV KMESSKQHFFHLWNDFAYIEVDGKKYPSSEDGIQVVVIDGNQGRVVSHTSFRNSILQGI PWQLFNYVATIPDNSIVLMASKGRYVSRGPWTRVLEKLGADRGLKLKEQMAFVGFKG SFRPIWVTLDTEDHKAKIFQVVPIPVVKKKKL corresponding to amino acids 2-500 of Q9H1K5 (SEQ ID NO:990), which also corresponds to amino acids 498-996 of R30650_PEA_{—}2_P5 (SEQ ID NO:992), wherein said first amino acid sequence and second amino acid sequence are contiguous and in a sequential order.

[0608] According to preferred embodiments of the present invention, there is provided an isolated polypeptide encoding for a head of R30650_PEA_{—}2_P5 (SEQ ID NO:992), comprising a polypeptide being at least 70%, optionally at least about 80%, preferably at least about 85%, more preferably at least about 90% and most preferably at least about 95% homologous to the sequence MDGVNLSTEVVYKKGQDYRFACYDRGRACRSYRVRFLCGKPVRPKLTVTIDTNVNSTI LNLEDNVQSWKPGDTLVIASTDYSMYQAEEFQVLPCRSCAPNQVKVAGKPMYLHIGEE IDGVDMRAEVGLLSRNIIVMGEMEDKCYPYRNHICNFFDFDTFGGHIKFALGFKAAHLE GTELKHMGQQLVGQYPIHFHLAGDVDERGGYDPPTYIRDLSIHHTFSRCVTVHGSNGLL IKDVVGYNSLGHCFFTEDGPEERNTFDHCLGLLVKSGTLLPSDRDSKMCKMITEDSYPG YIPKPRQDCNAVSTFWMANPNNNLINCAAAGSEETGFWFIFHHVPTGPSVGMYSPGYS EHIPLGKFYNNRAHSNYRAGMIIDNGVKTTEASAKDKRPFLSIISARYSPHQDADPLKPR EPAIIRHFIAYKNQDHGAWLRGGDVWLDSCRFADNGIGLTLASGGTFPYDDGSKQEIKN SLFVGESGNVGTEMMDNRIWGPGGLDH of R30650_PEA_{—}2_P5 (SEQ ID NO:992).

[0609] According to preferred embodiments of the present invention, there is provided an isolated chimeric polypeptide encoding for R30650_PEA_{—}2_P8 (SEQ ID NO:993), comprising a first amino acid sequence being at least 70%, optionally at least 80%, preferably at least 85%, more preferably at least 90% and most preferably at least 95% homologous to a polypeptide having the sequence MGAAGRQDFLFKAMLTISWLTLTCFPGATSTVAAGCPDQSPELQPWNPGHDQDHHVHI GQGKTLLLTSSATVYSIHISEGGKLVIKDHDEPIVLRTRHILIDNGGELHAGSALCPFQGN FTIILYGRADEGIQPDPYYGLKYIGVGKGGALELHGQKKLSWTFLNKTLHPGGMAEGG YFFERSWGHRGVIVHVIDPKSGTVIHSDRFDTYRSKKESERLVQYLNAVPDGRILSVAV NDEGSRNLDDMARKAMTKLGSKHFLHLGFRHPWSFLTVKGNPSSSVEDHIEYHGHRG SAAARVFKLFQTEHGEYFNVSLSSEWVQDVEWTEWFDHDKVSQTKGGEKISDLWK (SEQ ID NO:1469) corresponding to amino acids 1-348 of R30650_PEA_{—}2_P8 (SEQ ID NO:993), a second amino acid sequence being at least 90% homologous to AHPGKICNRPIDIQATTMDGVNLSTEVVYKKGQDYRFACYDRGRACRSYRVRFLCGKP VRPKLTVTIDTNVNSTILNLEDNVQSWKPGDTLVIASTDYSMYQAEEFQVLPCRSCAPN QVKVAGKPMYLHIGEEIDGVDMRAEVGLLSRNIIVMGEMEDKCYPYRNHICNFFDFDT FGGHIKFALGFKAAHLEGTELKHMGQQLVGQYPIHFHLAGDVDERGGYDPPTYIRDLSI HHTFSRCVTVHGSNGLLIKDVVGYNSLGHCFFTEDGPEERNTFDHCLGLLVKSGTLLPS DRDSKMCKMITEDSYPGYIPKPRQDCNAVSTFWMANPNNNLINCAAAGSEETGFWFIF HHVPTGPSVGMYSPGYSEHIPLGKFYNNRAHSNYRAGMIIDNGVKTTEASAKDKRPFLS IISARYSPHQDADPLKPREPAIIRHFIAYKNQDHGAWLRGGDVWLDSCRFADNGIGLTL ASGGTFPYDDGSKQEIKNSLFVGESGNVGTEMMDNRIWGPGGLDHSGRTLPIGQNFPIR GIQLYDGPINIQNCTFRKFVALEGRHTSALAFRLNNAWQSCPHNNVTGIAFEDVPITSRV FFGEPGPWFNQLDMDGDKTSVFHDVDGSVSEYPGSYLTKNDNWLVRHPDCINVPDWR GAICSGCYAQMYIQAYKTSNLRMKIIKNDFPSHPLYLEGALTRSTHYQQYQPVVTLQKG YTIHWDQTAPAELAIWLINFNKGDWIRVGLCYPRGTTFSILSDVHNRLLKQTSKTGVFV RTLQMDKVEQSYPGRSHYYWDEDSG corresponding to amino acids 1-788 of Q9ULM1 (SEQ ID NO:989), which also corresponds to amino acids 349-1136 of R30650_PEA_{—}2_P8 (SEQ ID NO:993), and a third amino acid sequence being at least 70%, optionally at least 80%, preferably at least 85%, more preferably at least 90% and most preferably at least 95% homologous to a polypeptide having the sequence KQRTISWR (SEQ ID NO:1470) corresponding to amino acids 1137-1144 of R30650_PEA_{—}2_P8 (SEQ ID NO:993), wherein said first amino acid sequence, second amino acid sequence and third amino acid sequence are contiguous and in a sequential order.

[0610] According to preferred embodiments of the present invention, there is provided an isolated polypeptide encoding for a head of R30650_PEA_{—}2_P8 (SEQ ID NO:993), comprising a polypeptide being at least 70%, optionally at least about 80%, preferably at least about 85%, more preferably at least about 90% and most preferably at least about 95% homologous to the sequence MGAAGRQDFLFKAMLTISWLTLTCFPGATSTVAAGCPDQSPELQPWNPGHDQDHHVHI GQGKTLLLTSSATVYSIHISEGGKLVIKDHDEPIVLRTRHILIDNGGELHAGSALCPFQGN FTIILYGRADEGIQPDPYYGLKYIGVGKGGALELHGQKKLSWTFLNKTLHPGGMAEGG YFFERSWGHRGVIVHVIDPKSGTVIHSDRFDTYRSKKESERLVQYLNAVPDGRILSVAV NDEGSRNLDDMARKAMTKLGSKHFLHLGFRHPWSFLTVKGNPSSSVEDHIEYHGHRG SAAARVFKLFQTEHGEYFNVSLSSEWVQDVEWTEWFDHDKVSQTKGGEKISDLWK (SEQ ID NO:1469) of R30650_PEA_{—}2_P8 (SEQ ID NO:993).

[0611] According to preferred embodiments of the present invention, there is provided an isolated polypeptide encoding for a tail of R30650_PEA_{—}2_P8 (SEQ ID NO:993), comprising a polypeptide being at least 70%, optionally at least about 80%, preferably at least about 85%, more preferably at least about 90% and most preferably at least about 95% homologous to the sequence KQRTISWR (SEQ ID NO:1470) in R30650_PEA_{—}2_P8 (SEQ ID NO:993).

[0612] According to preferred embodiments of the present invention, there is provided an isolated chimeric polypeptide encoding for R30650_PEA_{—}2_P8 (SEQ ID NO:993), comprising a first amino acid sequence being at least 90% homologous to MGAAGRQDFLFKAMLTISWLTLTCFPGATSTVAAGCPDQSPELQPWNPGHDQDHHVHI GQGKTLLLTSSATVYSIHISEGGKLVIKDHDEPIVLRTRHILIDNGGELHAGSALCPFQGN FTIILYGRADEGIQPDPYYGLKYIGVGKGGALELHGQKKLSWTFLNKTLHPGGMAEGG YFFERSWGHRGVIVHVIDPKSGTVIHSDRFDTYRSKKESERLVQYLNAVPDGRILSVAV NDEGSRNLDDMARKAMTKLGSKHFLHLGFRHPWSFLTVKGNPSSSVEDHIEYHGHRG SAAARVFKLFQTEHGEYFNVSLSSEWVQDVEWTEWFDHDKVSQTKGGEKISDLWKAH PGKICNRPIDIQATTMDGVNLSTEVVYKKGQDYRFACYDRGRACRSYRVRFLCGKPVR PKLTVTIDTNVNSTILNLEDNVQSWKPGDTLVIASTDYSMYQAEEFQVLPCRSCAPNQV KVAGKPMYLHIGEEIDGVDMRAEVGLLSRNIIVMGEMEDKCYPYRNHICNFFDFDTFG GHIKFALGFKAAHLEGTELKHMGQQLVGQYPIHFHLAGDVDERGGYDPPTYIRDLSIHH TFSRCVTVHGSNGLLIKDVVGYNSLGHCFFTEDGPEERNTFDHCLGLLVKSGTLLPSDR DSKMCKMITEDSYPGYIPKPRQDCNAVSTFWMANPNNNLINCAAAGSEETGFWFIFHH VPTGPSVGMYSPGYSEHIPLGKFYNNRAHSNYRAGMIIDNGVKTTEASAKDKRPFLSIIS ARYSPHQDADPLKPREPAIIRHFIAYKNQDHGAWLRGGDVWLDSCRFADNGIGLTLAS GGTFPYDDGSKQEIKNSLFVGESGNVGTEMMDNRIWGPGGLDHSGRTLPIGQNFPIRGI QLYDGPINIQNCTFRKFVALEGRHTSALAFRLNNAWQSCPHNNVTGIAFEDVPITSRVFF GEPGPWFNQLDMDGDKTSVFHDVDGSVSEYPGSYLTKND corresponding to amino acids 1-977 of Q8WUJ3 (SEQ ID NO:987), which also corresponds to amino acids 1-977 of R30650_PEA_{—}2_P8 (SEQ ID NO:993), and a second amino acid sequence being at least 70%, optionally at least 80%, preferably at least 85%, more preferably at least 90% and most preferably at least 95% homologous to a polypeptide having the sequence NWLVRHPDCINVPDWRGAICSGCYAQMYIQAYKTSNLRMKIIKNDFPSHPLYLEGALT RSTHYQQYQPVVTLQKGYTIHWDQTAPAELAIWLINFNKGDWIRVGLCYPRGTTFSILS DVHNRLLKQTSKTGVFVRTLQMDKVEQSYPGRSHYYWDEDSGKQRTISWR corresponding to amino acids 978-1144 of R30650_PEA_{—}2_P8 (SEQ ID NO:993), wherein said first amino acid sequence and second amino acid sequence are contiguous and in a sequential order.

[0613] According to preferred embodiments of the present invention, there is provided an isolated polypeptide encoding for a tail of R30650_PEA_{—}2_P8 (SEQ ID NO:993), comprising a polypeptide being at least 70%, optionally at least about 80%, preferably at least about 85%, more preferably at least about 90% and most preferably at least about 95% homologous to the sequence NWLVRHPDCINVPDWRGAICSGCYAQMYIQAYKTSNLRMKIIKNDFPSHPLYLEGALT RSTHYQQYQPVVTLQKGYTIHWDQTAPAELAIWLINFNKGDWIRVGLCYPRGTTFSILS DVHNRLLKQTSKTGVFVRTLQMDKVEQSYPGRSHYYWDEDSGKQRTISWR in R30650_PEA_{—}2_P8 (SEQ ID NO:993).

[0614] According to preferred embodiments of the present invention, there is provided an isolated chimeric polypeptide encoding for R30650_PEA_{—}2_P8 (SEQ ID NO:993), comprising a first amino acid sequence being at least 70%, optionally at least 80%, preferably at least 85%, more preferably at least 90% and most preferably at least 95% homologous to a polypeptide having the sequence MGAAGRQDFLFKAMLTISWLTLTCFPGATSTVAAGCPDQSPELQPWNPGHDQDHHVHI GQGKTLLLTSSATVYSIHISEGGKLVIKDHDEPIVLRTRHILIDNGGELHAGSALCPFQGN FTIILYGRADEGIQPDPYYGLKYIGVGKGGALELHGQKKLSWTFLNKTLHPGGMAEGG YFFERSWGHRGVIVHVIDPKSGTVIHSDRFDTYRSKKESERLVQYLNAVPDGRILSVAV NDEGSRNLDDMARKAMTKLGSKHFLHLGFRHPWSFLTVKGNPSSSVEDHIEYHGHRG SAAARVFKLFQTEHGEYFNVSLSSEWVQDVEWTEWFDHDKVSQTKGGEKISDLWKAH PGKICNRPIDIQATTMDGVNLSTEVVYKKGQDYRFACYDRGRACRSYRVRFLCGKPVR PKLTVTIDTNVNSTILNLEDNVQSWKPGDTLVIASTDYSMYQAEEFQVLPCRSCAPNQV KVAGKPMYLHIGEEIDGVDMRAEVGLLSRNIIVMGEMEDKCYPYRNHICNFFDFDTFG GHIKFALGFKAAHLEGTELKHMGQQLVGQYPIHFHLAGD corresponding to amino acids 1-564 of R30650_PEA_{—}2_P8 (SEQ ID NO:993), a second amino acid sequence being at least 90% homologous to VDERGGYDPPTYIRDLSIHHTFSRCVTVHGSNGLLIKDVVGYNSLGHCFFTEDGPEERNT FDHCLGLLVKSGTLLPSDRDSKMCKMITEDSYPGYIPKPRQDCNAVSTFWMANPNNNL INCAAAGSEETGFWFIFHHVPTGPSVGMYSPGYSEHIPLGKFYNNRAHSNYRAGMIIDN GVKTTEASAKDKRPFLSIISARYSPHQDADPLKPREPAIIRHFIAYKNQDHGAWLRGGDV WLDSCRFADNGIGLTLASGGTFPYDDGSKQEIKNSLFVGESGNVGTEMMDNRIWGPGG LDHSGRTLPIGQNFPIRGIQLYDGPINIQNCTFRKFVALEGRHTSALAFRLNNAWQSCPH NNVTGIAFEDVPITSRVFFGEPGPWFNQLDMDGDKTSVFHDVDGSVSEYPGSYLTKND NWLVRHPDCINVPDWRGAICSGCYAQMYIQAYKTSNLRMKIIKNDFPSHPLYLEGALT RSTHYQQYQPVVTLQKGYTIHWDQTAPAELAIWLINFNKGDWIRVGLCYPRGTTFSILS DVHNRLLKQTSKTGVFVRTLQMDKVEQSYPGRSHYYWDEDSG corresponding to amino acids 8-579 of Q9NPN9 (SEQ ID NO:988), which also corresponds to amino acids 565-1136 of R30650_PEA_{—}2_P8 (SEQ ID NO:993), and a third amino acid sequence being at least 70%, optionally at least 80%, preferably at least 85%, more preferably at least 90% and most preferably at least 95% homologous to a polypeptide having the sequence KQRTISWR (SEQ ID NO:1470) corresponding to amino acids 1137-1144 of R30650_PEA_{—}2_P8 (SEQ ID NO:993), wherein said first amino acid sequence, second amino acid sequence and third amino acid sequence are contiguous and in a sequential order.

[0615] According to preferred embodiments of the present invention, there is provided an isolated polypeptide encoding for a head of R30650_PEA_{—}2_P8 (SEQ ID NO:993), comprising a polypeptide being at least 70%, optionally at least about 80%, preferably at least about 85%, more preferably at least about 90% and most preferably at least about 95% homologous to the sequence MGAAGRQDFLFKAMLTISWLTLTCFPGATSTVAAGCPDQSPELQPWNPGHDQDHHVHI GQGKTLLLTSSATVYSIHISEGGKLVIKDHDEPIVLRTRHILIDNGGELHAGSALCPFQGN FTIILYGRADEGIQPDPYYGLKYIGVGKGGALELHGQKKLSWTFLNKTLHPGGMAEGG YFFERSWGHRGVIVHVIDPKSGTVIHSDRFDTYRSKKESERLVQYLNAVPDGRILSVAV NDEGSRNLDDMARKAMTKLGSKHFLHLGFRHPWSFLTVKGNPSSSVEDHIEYHGHRG SAAARVFKLFQTEHGEYFNVSLSSEWVQDVEWTEWFDHDKVSQTKGGEKISDLWKAH PGKICNRPIDIQATTMDGVNLSTEVVYKKGQDYRFACYDRGRACRSYRVRFLCGKPVR PKLTVTIDTNVNSTILNLEDNVQSWKPGDTLVIASTDYSMYQAEEFQVLPCRSCAPNQV KVAGKPMYLHIGEEIDGVDMRAEVGLLSRNIIVMGEMEDKCYPYRNHICNFFDFDTFG GHIKFALGFKAAHLEGTELKHMGQQLVGQYPIHFHLAGD of R30650_PEA_{—}2_P8 (SEQ ID NO:993).

[0616] According to preferred embodiments of the present invention, there is provided an isolated polypeptide encoding for a tail of R30650_PEA_{—}2_P8 (SEQ ID NO:993), comprising a polypeptide being at least 70%, optionally at least about 80%, preferably at least about 85%, more preferably at least about 90% and most preferably at least about 95% homologous to the sequence KQRTISWR (SEQ ID NO:1470) in R30650_PEA_{—}2_P8 (SEQ ID NO:993).

[0617] According to preferred embodiments of the present invention, there is provided an isolated chimeric polypeptide encoding for R30650_PEA_{—}2_P8 (SEQ ID NO:993), comprising a first amino acid sequence being at least 70%, optionally at least 80%, preferably at least 85%, more preferably at least 90% and most preferably at least 95% homologous to a polypeptide having the sequence MGAAGRQDFLFKAMLTISWLTLTCFPGATSTVAAGCPDQSPELQPWNPGHDQDHHVHI GQGKTLLLTSSATVYSIHISEGGKLVIKDHDEPIVLRTRHILIDNGGELHAGSALCPFQGN FTIILYGRADEGIQPDPYYGLKYIGVGKGGALELHGQKKLSWTFLNKTLHPGGMAEGG YFFERSWGHRGVIVHVIDPKSGTVIHSDRFDTYRSKKESERLVQYLNAVPDGRILSVAV NDEGSRNLDDMARKAMTKLGSKHFLHLGFRHPWSFLTVKGNPSSSVEDHIEYHGHRG SAAARVFKLFQTEHGEYFNVSLSSEWVQDVEWTEWFDHDKVSQTKGGEKISDLWKAH PGKICNRPIDIQATTMDGVNLSTEVVYKKGQDYRFACYDRGRACRSYRVRFLCGKPVR PKLTVTIDTNVNSTILNLEDNVQSWKPGDTLVIASTDYSMYQAEEFQVLPCRSCAPNQV KVAGKPMYLHIGEEIDGVDMRAEVGLLSRNIIVMGEMEDKCYPYRNHICNFFDFDTFG GHIKFALGFKAAHLEGTELKHMGQQLVGQYPIHFHLAGDVDERGGYDPPTYIRDLSIHH TFSRCVTVHGSNGLLIKDVVGYNSLGHCFFTEDGPEERNTFDHCLGLLVKSGTLLPSDR DSKMCKMITEDSYPGYIPKPRQDCNAVSTFWMANPNNNLINCAAAGSEETGFWFIFHH VPTGPSVGMYSPGYSEHIPLGKFYNNRAHSNYRAGMIIDNGVKTTEASAKDKRPFLSIIS ARYSPHQDADPLKPREPAIIRHFIAYKNQDHGAWLRGGDVWLDSCRFADNGIGLTLAS GGTFPYDDGSKQEIKNSLFVGESGNVGTEMMDNRIWGPGGLDH corresponding to amino acids 1-862 of R30650_PEA_{—}2_P8 (SEQ ID NO:993), a second amino acid sequence being at least 90% homologous to SGRTLPIGQNFPIRGIQLYDGPINIQNCTFRKFVALEGRHTSALAFRLNNAWQSCPHNNV TGIAFEDVPITSRVFFGEPGPWFNQLDMDGDKTSVFHDVDGSVSEYPGSYLTKNDNWL VRHPDCINVPDWRGAICSGCYAQMYIQAYKTSNLRMKIIKNDFPSHPLYLEGALTRSTH YQQYQPVVTLQKGYTIHWDQTAPAELAIWLINFNKGDWIRVGLCYPRGTTFSILSDVH NRLLKQTSKTGVFVRTLQMDKVEQSYPGRSHYYWDEDSG corresponding to amino acids 2-275 of Q9H1K5 (SEQ ID NO:990), which also corresponds to amino acids 863-1136 of R30650_PEA_{—}2_P8 (SEQ ID NO:993), and a third amino acid sequence being at least 70%, optionally at least 80%, preferably at least 85%, more preferably at least 90% and most preferably at least 95% homologous to a polypeptide having the sequence KQRTISWR (SEQ ID NO:1470) corresponding to amino acids 1137-1144 of R30650_PEA_{—}2_P8 (SEQ ID NO:993), wherein said first amino acid sequence, second amino acid sequence and third amino acid sequence are contiguous and in a sequential order.

[0618] According to preferred embodiments of the present invention, there is provided an isolated polypeptide encoding for a head of R30650_PEA_{—}2_P8 (SEQ ID NO:993), comprising a polypeptide being at least 70%, optionally at least about 80%, preferably at least about 85%, more preferably at least about 90% and most preferably at least about 95% homologous to the sequence MGAAGRQDFLFKAMLTISWLTLTCFPGATSTVAAGCPDQSPELQPWNPGHDQDHHVHI GQGKTLLLTSSATVYSIHISEGGKLVIKDHDEPIVLRTRHILIDNGGELHAGSALCPFQGN FTIILYGRADEGIQPDPYYGLKYIGVGKGGALELHGQKKLSWTFLNKTLHPGGMAEGG YFFERSWGHRGVIVHVIDPKSGTVIHSDRFDTYRSKKESERLVQYLNAVPDGRILSVAV NDEGSRNLDDMARKAMTKLGSKHFLHLGFRHPWSFLTVKGNPSSSVEDHIEYHGHRG SAAARVFKLFQTEHGEYFNVSLSSEWVQDVEWTEWFDHDKVSQTKGGEKISDLWKAH PGKICNRPIDIQATTMDGVNLSTEVVYKKGQDYRFACYDRGRACRSYRVRFLCGKPVR PKLTVTIDTNVNSTILNLEDNVQSWKPGDTLVIASTDYSMYQAEEFQVLPCRSCAPNQV KVAGKPMYLHIGEEIDGVDMRAEVGLLSRNIIVMGEMEDKCYPYRNHICNFFDFDTFG GHIKFALGFKAAHLEGTELKHMGQQLVGQYPIHFHLAGDVDERGGYDPPTYIRDLSIHH TFSRCVTVHGSNGLLIKDVVGYNSLGHCFFTEDGPEERNTFDHCLGLLVKSGTLLPSDR DSKMCKMITEDSYPGYIPKPRQDCNAVSTFWMANPNNNLINCAAAGSEETGFWFIFHH VPTGPSVGMYSPGYSEHIPLGKFYNNRAHSNYRAGMIIDNGVKTTEASAKDKRPFLSIIS ARYSPHQDADPLKPREPAIIRHFIAYKNQDHGAWLRGGDVWLDSCRFADNGIGLTLAS GGTFPYDDGSKQEIKNSLFVGESGNVGTEMMDNRIWGPGGLDH of R30650_PEA_{—}2_P8 (SEQ ID NO:993).

[0619] According to preferred embodiments of the present invention, there is provided an isolated polypeptide encoding for a tail of R30650_PEA_{—}2_P8 (SEQ ID NO:993), comprising a polypeptide being at least 70%, optionally at least about 80%, preferably at least about 85%, more preferably at least about 90% and most preferably at least about 95% homologous to the sequence KQRTISWR (SEQ ID NO:1470) in R30650_PEA_{—}2_P8 (SEQ ID NO:993).

[0620] According to preferred embodiments of the present invention, there is provided an isolated chimeric polypeptide encoding for R30650_PEA_{—}2_P15 (SEQ ID NO:996), comprising a first amino acid sequence being at least 70%, optionally at least 80%, preferably at least 85%, more preferably at least 90% and most preferably at least 95% homologous to a polypeptide having the sequence MGAAGRQDFLFKAMLTISWLTLTCFPGATSTVAAGCPDQSPELQPWNPGHDQDHHVHI GQGKTLLLTSSATVYSIHISEGGKLVIKDHDEPIVLRTRHILIDNGGELHAGSALCPFQGN FTIILYGRADEGIQPDPYYGLKYIGVGKGGALELHGQKKLSWTFLNKTLHPGGMAEGG YFFERSWGHRGVIVHVIDPKSGTVIHSDRFDTYRSKKESERLVQYLNAVPDGRILSVAV NDEGSRNLDDMARKAMTKLGSKHFLHLGFRHPWSFLTVKGNPSSSVEDHIEYHGHRG SAAARVFKLFQTEHGEYFNVSLSSEWVQDVEWTEWFDHDKVSQTKGGEKISDLWK (SEQ ID NO:1469) corresponding to amino acids 1-348 of R30650_PEA_{—}2_P15 (SEQ ID NO:996), and a second amino acid sequence being at least 90% homologous to AHPGKICNRPIDIQATTMDGVNLSTEVVYKKGQDYRFACYDRGRACRSYRVRFLCGKP VRPKLTVTIDTNVNSTILNLEDNVQSWKPGDTLVIASTDYSMYQAEEFQVLPCRSCAPN QVKVAGKPMYLHIGEEIDGVDMRAEVGLLSRNIIVMGEMEDKCYPYRNHICNFFDFDT FGGHIKFALGFKAAHLEGTELKHMGQQLVGQYPIHFHLAGDVDERGGYDPPTYIRDLSI HHTFSRCVTVHGSNGLLIKDVVGYNSLGHCFFTEDGPEERNTFDHCLGLLVKSGTLLPS DRDSKMCKMITEDSYPGYIPKPRQDCNAVSTFWMANPNNNLINCAAAGSEETGFWFIF HHVPTGPSVGMYSPGYSEHIPLGKFYNNRAHSNYRAGMIIDNGVKTTEASAKDKRPFLS IISARYSPHQDADPLKPREPAIIRHFIAYKNQDHGAWLRGGDVWLDSCRFADNGIGLTL ASGGTFPYDDGSKQEIKNSLFVGESGNVGTEMMDNRIWGPGGLDHSGRTLPIGQNFPIR GIQLYDGPINIQNCTFRKFVALEGRHTSALAFRLNNAWQSCPHNNVTGIAFEDVPITSRV FFGEPGPWFNQLDMDGDKTSVFHDVDGSVSEYPGSYLTKNDNWLVRHPDCINVPDWR GAICSGCYAQMYIQAYKTSNLRMKIIKNDFPSHPLYLEGALTRSTHYQQYQPVVTLQKG YTIHWDQTAPAELAIWLINFNKGDWIRVGLCYPRGTTFSILSDVHNRLLKQTSKTGVFV RTLQMDKVEQSYPGRSHYYWDEDSG corresponding to amino acids 1-788 of Q9ULM1 (SEQ ID NO:989), which also corresponds to amino acids 349-1136 of R30650_PEA_{—}2_P15 (SEQ ID NO:996), wherein said first amino acid sequence and second amino acid sequence are contiguous and in a sequential order.

[0621] According to preferred embodiments of the present invention, there is provided an isolated polypeptide encoding for a head of R30650_PEA_{—}2_P115 (SEQ ID NO:996), comprising a polypeptide being at least 70%, optionally at least about 80%, preferably at least about 85%, more preferably at least about 90% and most preferably at least about 95% homologous to the sequence MGAAGRQDFLFKAMLTISWLTLTCFPGATSTVAAGCPDQSPELQPWNPGHDQDHHVHI GQGKTLLLTSSATVYSIHISEGGKLVIKDHDEPIVLRTRHILIDNGGELHAGSALCPFQGN FTIILYGRADEGIQPDPYYGLKYIGVGKGGALELHGQKKLSWTFLNKTLHPGGMAEGG YFFERSWGHRGVIVHVIDPKSGTVIHSDRFDTYRSKKESERLVQYLNAVPDGRILSVAV NDEGSRNLDDMARKAMTKLGSKHFLHLGFRHPWSFLTVKGNPSSSVEDHIEYHGHRG SAAARVFKLFQTEHGEYFNVSLSSEWVQDVEWTEWFDHDKVSQTKGGEKISDLWK (SEQ ID NO:1469) of R30650_PEA_{—}2_P15 (SEQ ID NO:996).

[0622] According to preferred embodiments of the present invention, there is provided an isolated chimeric polypeptide encoding for R30650_PEA_{—}2_P15 (SEQ ID NO:996), comprising a first amino acid sequence being at least 90% homologous to MGAAGRQDFLFKAMLTISWLTLTCFPGATSTVAAGCPDQSPELQPWNPGHDQDHHVHI GQGKTLLLTSSATVYSIHISEGGKLVIKDHDEPIVLRTRHILIDNGGELHAGSALCPFQGN FTIILYGRADEGIQPDPYYGLKYIGVGKGGALELHGQKKLSWTFLNKTLHPGGMAEGG YFFERSWGHRGVIVHVIDPKSGTVIHSDRFDTYRSKKESERLVQYLNAVPDGRILSVAV NDEGSRNLDDMARKAMTKLGSKHFLHLGFRHPWSFLTVKGNPSSSVEDHIEYHGHRG SAAARVFKLFQTEHGEYFNVSLSSEWVQDVEWTEWFDHDKVSQTKGGEKISDLWKAH PGKICNRPIDIQATTMDGVNLSTEVVYKKGQDYRFACYDRGRACRSYRVRFLCGKPVR PKLTVTIDTNVNSTILNLEDNVQSWKPGDTLVIASTDYSMYQAEEFQVLPCRSCAPNQV KVAGKPMYLHIGEEIDGVDMRAEVGLLSRNIIVMGEMEDKCYPYRNHICNFFDFDTFG GHIKFALGFKAAHLEGTELKHMGQQLVGQYPIHFHLAGDVDERGGYDPPTYIRDLSIHH TFSRCVTVHGSNGLLIKDVVGYNSLGHCFFTEDGPEERNTFDHCLGLLVKSGTLLPSDR DSKMCKMITEDSYPGYIPKPRQDCNAVSTFWMANPNNNLINCAAAGSEETGFWFIFHH VPTGPSVGMYSPGYSEHIPLGKFYNNRAHSNYRAGMIIDNGVKTTEASAKDKRPFLSIIS ARYSPHQDADPLKPREPAIIRHFIAYKNQDHGAWLRGGDVWLDSCRFADNGIGLTLAS GGTFPYDDGSKQEIKNSLFVGESGNVGTEMMDNRIWGPGGLDHSGRTLPIGQNFPIRGI QLYDGPINIQNCTFRKFVALEGRHTSALAFRLNNAWQSCPHNNVTGIAFEDVPITSRVFF GEPGPWFNQLDMDGDKTSVFHDVDGSVSEYPGSYLTKND corresponding to amino acids 1-977 of Q8WUJ3 (SEQ ID NO:987), which also corresponds to amino acids 1-977 of R30650_PEA_{—}2_P15 (SEQ ID NO:996), and a second amino acid sequence being at least 70%, optionally at least 80%, preferably at least 85%, more preferably at least 90% and most preferably at least 95% homologous to a polypeptide having the sequence NWLVRHPDCINVPDWRGAICSGCYAQMYIQAYKTSNLRMKIIKNDFPSHPLYLEGALT RSTHYQQYQPVVTLQKGYTIHWDQTAPAELAIWLINFNKGDWIRVGLCYPRGTTFSILS DVHNRLLKQTSKTGVFVRTLQMDKVEQSYPGRSHYYWDEDSG (SEQ ID NO:1472) corresponding to amino acids 978-1136 of R30650_PEA_{—}2_P15 (SEQ ID NO:996), wherein said first amino acid sequence and second amino acid sequence are contiguous and in a sequential order.

[0623] According to preferred embodiments of the present invention, there is provided an isolated polypeptide encoding for a tail of R30650_PEA_{—}2_P15 (SEQ ID NO:996), comprising a polypeptide being at least 70%, optionally at least about 80%, preferably at least about 85%, more preferably at least about 90% and most preferably at least about 95% homologous to the sequence NWLVRHPDCINVPDWRGAICSGCYAQMYIQAYKTSNLRMKIIKNDFPSHPLYLEGALT RSTHYQQYQPVVTLQKGYTIHWDQTAPAELAIWLINFNKGDWIRVGLCYPRGTTFSILS DVHNRLLKQTSKTGVFVRTLQMDKVEQSYPGRSHYYWDEDSG (SEQ ID NO:1472) in R30650_PEA_{—}2_P15 (SEQ ID NO:996).

[0624] According to preferred embodiments of the present invention, there is provided an isolated chimeric polypeptide encoding for R30650_PEA_{—}2_P15 (SEQ ID NO:996), comprising a first amino acid sequence being at least 70%, optionally at least 80%, preferably at least 85%, more preferably at least 90% and most preferably at least 95% homologous to a polypeptide having the sequence MGAAGRQDFLFKAMLTISWLTLTCFPGATSTVAAGCPDQSPELQPWNPGHDQDHHVHI GQGKTLLLTSSATVYSIHISEGGKLVIKDHDEPIVLRTRHILIDNGGELHAGSALCPFQGN FTIILYGRADEGIQPDPYYGLKYIGVGKGGALELHGQKKLSWTFLNKTLHPGGMAEGG YFFERSWGHRGVIVHVIDPKSGTVIHSDRFDTYRSKKESERLVQYLNAVPDGRILSVAV NDEGSRNLDDMARKAMTKLGSKHFLHLGFRHPWSFLTVKGNPSSSVEDHIEYHGHRG SAAARVFKLFQTEHGEYFNVSLSSEWVQDVEWTEWFDHDKVSQTKGGEKISDLWKAH PGKICNRPIDIQATTMDGVNLSTEVVYKKGQDYRFACYDRGRACRSYRVRFLCGKPVR PKLTVTIDTNVNSTILNLEDNVQSWKPGDTLVIASTDYSMYQAEEFQVLPCRSCAPNQV KVAGKPMYLHIGEEIDGVDMRAEVGLLSRNIIVMGEMEDKCYPYRNHICNFFDFDTFG GHIKFALGFKAAHLEGTELKHMGQQLVGQYPIHFHLAGD corresponding to amino acids 1-564 of R30650_PEA_{—}2_P15 (SEQ ID NO:996), and a second amino acid sequence being at least 90% homologous to VDERGGYDPPTYIRDLSIHHTFSRCVTVHGSNGLLIKDVVGYNSLGHCFFTEDGPEERNT FDHCLGLLVKSGTLLPSDRDSKMCKMITEDSYPGYIPKPRQDCNAVSTFWMANPNNNL INCAAAGSEETGFWFIFHHVPTGPSVGMYSPGYSEHIPLGKFYNNRAHSNYRAGMIIDN GVKTTEASAKDKRPFLSIISARYSPHQDADPLKPREPAIIRHFIAYKNQDHGAWLRGGDV WLDSCRFADNGIGLTLASGGTFPYDDGSKQEIKNSLFVGESGNVGTEMMDNRIWGPGG LDHSGRTLPIGQNFPIRGIQLYDGPINIQNCTFRKFVALEGRHTSALAFRLNNAWQSCPH NNVTGIAFEDVPITSRVFFGEPGPWFNQLDMDGDKTSVFHDVDGSVSEYPGSYLTKND NWLVRHPDCINVPDWRGAICSGCYAQMYIQAYKTSNLRMKIIKNDFPSHPLYLEGALT RSTHYQQYQPVVTLQKGYTIHWDQTAPAELAIWLINFNKGDWIRVGLCYPRGTTFSILS DVHNRLLKQTSKTGVFVRTLQMDKVEQSYPGRSHYYWDEDSG corresponding to amino acids 8-579 of Q9NPN9 (SEQ ID NO:988), which also corresponds to amino acids 565-1136 of R30650_PEA_{—}2_P15 (SEQ ID NO:996), wherein said first amino acid sequence and second amino acid sequence are contiguous and in a sequential order.

[0625] According to preferred embodiments of the present invention, there is provided an isolated polypeptide encoding for a head of R30650_PEA_{—}2_P15 (SEQ ID NO:996), comprising a polypeptide being at least 70%, optionally at least about 80%, preferably at least about 85%, more preferably at least about 90% and most preferably at least about 95% homologous to the sequence MGAAGRQDFLFKAMLTISWLTLTCFPGATSTVAAGCPDQSPELQPWNPGHDQDHHVHI GQGKTLLLTSSATVYSIHISEGGKLVIKDHDEPIVLRTRHILIDNGGELHAGSALCPFQGN FTIILYGRADEGIQPDPYYGLKYIGVGKGGALELHGQKKLSWTFLNKTLHPGGMAEGG YFFERSWGHRGVIVHVIDPKSGTVIHSDRFDTYRSKKESERLVQYLNAVPDGRILSVAV NDEGSRNLDDMARKAMTKLGSKHFLHLGFRHPWSFLTVKGNPSSSVEDHIEYHGHRG SAAARVFKLFQTEHGEYFNVSLSSEWVQDVEWTEWFDHDKVSQTKGGEKISDLWKAH PGKICNRPIDIQATTMDGVNLSTEVVYKKGQDYRFACYDRGRACRSYRVRFLCGKPVR PKLTVTIDTNVNSTILNLEDNVQSWKPGDTLVIASTDYSMYQAEEFQVLPCRSCAPNQV KVAGKPMYLHIGEEIDGVDMRAEVGLLSRNIIVMGEMEDKCYPYRNHICNFFDFDTFG GHIKFALGFKAAHLEGTELKHMGQQLVGQYPIHFHLAGD of R30650_PEA_{—}2_P15 (SEQ ID NO:996).

[0626] According to preferred embodiments of the present invention, there is provided an isolated chimeric polypeptide encoding for R30650_PEA_{—}2_P15 (SEQ ID NO:996), comprising a first amino acid sequence being at least 70%, optionally at least 80%, preferably at least 85%, more preferably at least 90% and most preferably at least 95% homologous to a polypeptide having the sequence MGAAGRQDFLFKAMLTISWLTLTCFPGATSTVAAGCPDQSPELQPWNPGHDQDHHVHI GQGKTLLLTSSATVYSIHISEGGKLVIKDHDEPIVLRTRHILIDNGGELHAGSALCPFQGN FTIILYGRADEGIQPDPYYGLKYIGVGKGGALELHGQKKLSWTFLNKTLHPGGMAEGG YFFERSWGHRGVIVHVIDPKSGTVIHSDRFDTYRSKKESERLVQYLNAVPDGRILSVAV NDEGSRNLDDMARKAMTKLGSKHFLHLGFRHPWSFLTVKGNPSSSVEDHIEYHGHRG SAAARVFKLFQTEHGEYFNVSLSSEWVQDVEWTEWFDHDKVSQTKGGEKISDLWKAH PGKICNRPIDIQATTMDGVNLSTEVVYKKGQDYRFACYDRGRACRSYRVRFLCGKPVR PKLTVTIDTNVNSTILNLEDNVQSWKPGDTLVIASTDYSMYQAEEFQVLPCRSCAPNQV KVAGKPMYLHIGEEIDGVDMRAEVGLLSRNIIVMGEMEDKCYPYRNHICNFFDFDTFG GHIKFALGFKAAHLEGTELKHMGQQLVGQYPIHFHLAGDVDERGGYDPPTYIRDLSIHH TFSRCVTVHGSNGLLIKDVVGYNSLGHCFFTEDGPEERNTFDHCLGLLVKSGTLLPSDR DSKMCKMITEDSYPGYIPKPRQDCNAVSTFWMANPNNNLINCAAAGSEETGFWFIFHH VPTGPSVGMYSPGYSEHIPLGKFYNNRAHSNYRAGMIIDNGVKTTEASAKDKRPFLSIIS ARYSPHQDADPLKPREPAIIRHFIAYKNQDHGAWLRGGDVWLDSCRFADNGIGLTLAS GGTFPYDDGSKQEIKNSLFVGESGNVGTEMMDNRIWGPGGLDH corresponding to amino acids 1-862 of R30650_PEA_{—}2_P15 (SEQ ID NO:996), and a second amino acid sequence being at least 90% homologous to SGRTLPIGQNFPIRGIQLYDGPINIQNCTFRKFVALEGRHTSALAFRLNNAWQSCPHNNV TGIAFEDVPITSRVFFGEPGPWFNQLDMDGDKTSVFHDVDGSVSEYPGSYLTKNDNWL VRHPDCINVPDWRGAICSGCYAQMYIQAYKTSNLRMKIIKNDFPSHPLYLEGALTRSTH YQQYQPVVTLQKGYTIHWDQTAPAELAIWLINFNKGDWIRVGLCYPRGTTFSILSDVH NRLLKQTSKTGVFVRTLQMDKVEQSYPGRSHYYWDEDSG corresponding to amino acids 2-275 of Q9H1K5 (SEQ ID NO:990), which also corresponds to amino acids 863-1136 of R30650_PEA_{—}2_P15 (SEQ ID NO:996), wherein said first amino acid sequence and second amino acid sequence are contiguous and in a sequential order.

[0627] According to preferred embodiments of the present invention, there is provided an isolated polypeptide encoding for a head of R30650_PEA_{—}2_P15 (SEQ ID NO:996), comprising a polypeptide being at least 70%, optionally at least about 80%, preferably at least about 85%, more preferably at least about 90% and most preferably at least about 95% homologous to the sequence MGAAGRQDFLFKAMLTISWLTLTCFPGATSTVAAGCPDQSPELQPWNPGHDQDHHVHI GQGKTLLLTSSATVYSIHISEGGKLVIKDHDEPIVLRTRHILIDNGGELHAGSALCPFQGN FTIILYGRADEGIQPDPYYGLKYIGVGKGGALELHGQKKLSWTFLNKTLHPGGMAEGG YFFERSWGHRGVIVHVIDPKSGTVIHSDRFDTYRSKKESERLVQYLNAVPDGRILSVAV NDEGSRNLDDMARKAMTKLGSKHFLHLGFRHPWSFLTVKGNPSSSVEDHIEYHGHRG SAAARVFKLFQTEHGEYFNVSLSSEWVQDVEWTEWFDHDKVSQTKGGEKISDLWKAH PGKICNRPIDIQATTMDGVNLSTEVVYKKGQDYRFACYDRGRACRSYRVRFLCGKPVR PKLTVTIDTNVNSTILNLEDNVQSWKPGDTLVIASTDYSMYQAEEFQVLPCRSCAPNQV KVAGKPMYLHIGEEIDGVDMRAEVGLLSRNIIVMGEMEDKCYPYRNHICNFFDFDTFG GHIKFALGFKAAHLEGTELKHMGQQLVGQYPIHFHLAGDVDERGGYDPPTYIRDLSIHH TFSRCVTVHGSNGLLIKDVVGYNSLGHCFFTEDGPEERNTFDHCLGLLVKSGTLLPSDR DSKMCKMITEDSYPGYIPKPRQDCNAVSTFWMANPNNNLINCAAAGSEETGFWFIFHH VPTGPSVGMYSPGYSEHIPLGKFYNNRAHSNYRAGMIIDNGVKTTEASAKDKRPFLSIIS ARYSPHQDADPLKPREPAIIRHFIAYKNQDHGAWLRGGDVWLDSCRFADNGIGLTLAS GGTFPYDDGSKQEIKNSLFVGESGNVGTEMMDNRIWGPGGLDH of R30650_PEA_{—}2_P15 (SEQ ID NO:996).

[0628] According to preferred embodiments of the present invention, there is provided an isolated chimeric polypeptide encoding for R30650_PEA_{—}2_P17 (SEQ ID NO:997), comprising a first amino acid sequence being at least 90% homologous to MGAAGRQDFLFKAMLTISWLTLTCFPGATSTVAAGCPDQSPELQPWNPGHDQDHHVHI GQGKTLLLTSSATVYSIHISEGGKLVIKDHDEPIVLRTRHILIDNGGELHAGSALCPFQGN FTIILYGRADEGIQPDPYYGLKYIGVGKGGALELHGQKKLSWTFLNKTLHPGGMAEGG YFFERSWGHRGVIVHVIDPKSGTVIHSDRFDTYRSKKESERLVQYLNAVPDGRILSVAV NDEGSRNLDDMARKAMTKLGSKHFLHLGFRHPWSFLTVKGNPSSSVEDHIEYHGHRG SAAARVFKLFQTEHGEYFNVSLSSEWVQ corresponding to amino acids 1-321 of Q8WUJ3 (SEQ ID NO:987), which also corresponds to amino acids 1-321 of R30650_PEA_{—}2_P17 (SEQ ID NO:997), and a second amino acid sequence being at least 70%, optionally at least 80%, preferably at least 85%, more preferably at least 90% and most preferably at least 95% homologous to a polypeptide having the sequence GEEFQTIW (SEQ ID NO:1473) corresponding to amino acids 322-329 of R30650_PEA_{—}2_P17 (SEQ ID NO:997), wherein said first amino acid sequence and second amino acid sequence are contiguous and in a sequential order.

[0629] According to preferred embodiments of the present invention, there is provided an isolated polypeptide encoding for a tail of R30650_PEA_{—}2_P17 (SEQ ID NO:997), comprising a polypeptide being at least 70%, optionally at least about 80%, preferably at least about 85%, more preferably at least about 90% and most preferably at least about 95% homologous to the sequence GEEFQTIW (SEQ ID NO:1473) in R30650_PEA_{—}2_P17 (SEQ ID NO:997).

[0630] According to preferred embodiments of the present invention, there is provided an isolated chimeric polypeptide encoding for M78035_P4 (SEQ ID NO:924), comprising a first amino acid sequence being at least 90% homologous to MPGLMRMRERYSASKPLKGARIAGCLHMTVETAVLIETLVTLGAEVQWSSCNIFSTQD HAAAAIAKAGIPVYAWKGETDEEYLWCIEQTLYFKDGPLNMILDDGGDLTNLIHTKYP QLLPGIRGISEETTTGVHNLYKMMANGILKVPAINNDSVTKSKFDNLYGCRESLIDGIK RATDVMIAGKVAVVAGYGDVGKGCAQALRGFGARVIITEIDPINALQAAMEGYEVTT MDEACQEGNIFVTTTGCIDIILGRHFEQMKDDAIVCNIGHFDVEIDVKWLNENAVEKVN IKPQVDRYRLKNGRRIILLAEGRLVNLGCAMGHPSFVMSNSFTNQVMAQIELWTHPDK YPVGVHFLPKKLDEAVAEAHLGKLNVKLTKLTEKQAQYLGMSCDGPFKPDHYRY corresponding to amino acids 29-432 of SAHH_HUMAN (SEQ ID NO:922), which also corresponds to amino acids 1-404 of M78035_P4 (SEQ ID NO:924).

[0631] According to preferred embodiments of the present invention, there is provided an isolated chimeric polypeptide encoding for M78035_P6 (SEQ ID NO:925), comprising a first amino acid sequence being at least 90% homologous to MILDDGGDLTNLIHTKYPQLLPGIRGISEETTTGVHNLYKMMANGILKVPAINVNDSVT KSKFDNLYGCRESLIDGIKRATDVMIAGKVAVVAGYGDVGKGCAQALRGFGARVIITEI DPINALQAAMEGYEVTTMDEACQEGNIFVTTTGCIDIILGRHFEQMKDDAIVCNIGHFD VEIDVKWLNENAVEKVNIKPQVDRYRLKNGRRIILLAEGRLVNLGCAMGHPSFVMSNS FTNQVMAQIELWTHPDKYPVGVHFLPKKLDEAVAEAHLGKLNVKLTKLTEKQAQYLG MSCDGPFKPDHYRY corresponding to amino acids 127-432 of SAHH_HUMAN (SEQ ID NO:922), which also corresponds to amino acids 1-306 of M78035_P6 (SEQ ID NO:925).

[0632] According to preferred embodiments of the present invention, there is provided an isolated chimeric polypeptide encoding for M78035_P8 (SEQ ID NO:926), comprising a first amino acid sequence being at least 70%, optionally at least 80%, preferably at least 85%, more preferably at least 90% and most preferably at least 95% homologous to a polypeptide having the sequence MSDKLPYKV (SEQ ID NO:1474) corresponding to amino acids 1-9 of M78035_P8 (SEQ ID NO:926), and a second amino acid sequence being at least 90% homologous to VYAWKGETDEEYLWCIEQTLYFKDGPLNMILDDGGDLTNLIHTKYPQLLPGIRGISEET TTGVHNLYKMMANGILKVPAINVNDSVTKSKFDNLYGCRESLIDGIKRATDVMIAGKV AVVAGYGDVGKGCAQALRGFGARVIITEIDPINALQAAMEGYEVTTMDEACQEGNIFV TTTGCIDIILGRHFEQMKDDAIVCNIGHFDVEIDVKWLNENAVEKVNIKPQVDRYRLKN GRRIILLAEGRLVNLGCAMGHPSFVMSNSFTNQVMAQIELWTHPDKYPVGVHFLPKKL DEAVAEAHLGKLNVKLTKLTEKQAQYLGMSCDGPFKPDHYRY corresponding to amino acids 99-432 of SAHH_HUMAN (SEQ ID NO:922), which also corresponds to amino acids 10-343 of M78035_P8 (SEQ ID NO:926), wherein said first amino acid sequence and second amino acid sequence are contiguous and in a sequential order.

[0633] According to preferred embodiments of the present invention, there is provided an isolated polypeptide encoding for a head of M78035_P8 (SEQ ID NO:926), comprising a polypeptide being at least 70%, optionally at least about 80%, preferably at least about 85%, more preferably at least about 90% and most preferably at least about 95% homologous to the sequence MSDKLPYKV (SEQ ID NO:1474) of M78035_P8 (SEQ ID NO:926).

[0634] According to preferred embodiments of the present invention, there is provided an isolated chimeric polypeptide encoding for HUMCEA_PEA_{—}1_P4 (SEQ ID NO:864), comprising a first amino acid sequence being at least 90% homologous to MESPSAPPHRWCIPWQRLLLTASLLTFWNPPTTAKLTIESTPFNVAEGKEVLLLVHNLPQ HLFGYSWYKGERVDGNRQIIGYVIGTQQATPGPAYSGREIIYPNASLLIQNIIQNDTGFYT LHVIKSDLVNEEATGQFRVYPELPKPSISSNNSKPVEDKDAVAFTCEPETQDATYLWWV NNQSLPVSPRLQLSNGNRTLTLFNVTRNDTASYKCETQNPVSARRSDSVILNVL corresponding to amino acids 1-234 of CEA5_HUMAN (SEQ ID NO:863), which also corresponds to amino acids 1-234 of HUMCEA_PEA_{—}1_P4 (SEQ ID NO:864), and a second amino acid sequence being at least 70%, optionally at least 80%, preferably at least 85%, more preferably at least 90% and most preferably at least 95% homologous to a polypeptide having the sequence CEYICSSLAQAASPNPQGQRQDFSVPLRFKYTDPQPWTSRLSVTFCPRKTWADQVLTKN RRGGAASVLGGSGSTPYDGRNR (SEQ ID NO:1475) corresponding to amino acids 235-315 of HUMCEA_PEA_{—}1_P4 (SEQ ID NO:864), wherein said first amino acid sequence and second amino acid sequence are contiguous and in a sequential order.

[0635] According to preferred embodiments of the present invention, there is provided an isolated polypeptide encoding for a tail of HUMCEA_PEA_{—}1_P4 (SEQ ID NO:864), comprising a polypeptide being at least 70%, optionally at least about 80%, preferably at least about 85%, more preferably at least about 90% and most preferably at least about 95% homologous to the sequence CEYICSSLAQAASPNPQGQRQDFSVPLRFKYTDPQPWTSRLSVTFCPRKTWADQVLTKN RRGGAASVLGGSGSTPYDGRNR (SEQ ID NO:1475) in HUMCEA_PEA_{—}1_P4 (SEQ ID NO:864).

[0636] According to preferred embodiments of the present invention, there is provided an isolated chimeric polypeptide encoding for HUMCEA_PEA_{—}1_P5 (SEQ ID NO:865), comprising a first amino acid sequence being at least 90% homologous to MESPSAPPHRWCIPWQRLLLTASLLTFWNPPTTAKLTIESTPFNVAEGKEVLLLVHNLPQ HLFGYSWYKGERVDGNRQIIGYVIGTQQATPGPAYSGREIIYPNASLLIQNIIQNDTGFYT LHVIKSDLVNEEATGQFRVYPELPKPSISSNNSKPVEDKDAVAFTCEPETQDATYLWWV NNQSLPVSPRLQLSNGNRTLTLFNVTRNDTASYKCETQNPVSARRSDSVILNVLYGPDA PTISPLNTSYRSGENLNLSCHAASNPPAQYSWFVNGTFQQSTQELFIPNITVNNSGSYTC QAHNSDTGLNRTTVTTITVYAEPPKPFITSNNSNPVEDEDAVALTCEPEIQNTTYLWWV NNQSLPVSPRLQLSNDNRTLTLLSVTRNDVGPYECGIQNELSVDHSDPVILNVLYGPDD PTISPSYTYYRPGVNLSLSCHAASNPPAQYSWLIDGNIQQHTQELFISNITEKNSGLYTCQ ANNSASGHSRTTVKTITVSAELPKPSISSNNSKPVEDKDAVAFTCEPEAQNTTYLWWVN GQSLPVSPRLQLSNGNRTLTLFNVTRNDARAYVCGIQNSVSANRSDPVTLDVLYGPDTP IISPPDSSYLSGANLNLSCHSASNPSPQYSWRINGIPQQHTQVLFIAKITPNNNGTYACFV SNLATGRNNSIVKSITVS corresponding to amino acids 1-675 of CEA5_HUMAN (SEQ ID NO:863), which also corresponds to amino acids 1-675 of HUMCEA_PEA_{—}1_P5 (SEQ ID NO:865), and a second amino acid sequence being at least 70%, optionally at least 80%, preferably at least 85%, more preferably at least 90% and most preferably at least 95% homologous to a polypeptide having the sequence GKWLPGASASYSGVESIWFSPKSQEDIFFPSLCSMGTRKSQILS (SEQ ID NO:1476) corresponding to amino acids 676-719 of HUMCEA_PEA_{—}1_P5 (SEQ ID NO:865), wherein said first amino acid sequence and second amino acid sequence are contiguous and in a sequential order.

[0637] According to preferred embodiments of the present invention, there is provided an isolated polypeptide encoding for a tail of HUMCEA_PEA_{—}1_P5 (SEQ ID NO:865), comprising a polypeptide being at least 70%, optionally at least about 80%, preferably at least about 85%, more preferably at least about 90% and most preferably at least about 95% homologous to the sequence GKWLPGASASYSGVESIWFSPKSQEDIFFPSLCSMGTRKSQILS (SEQ ID NO:1476) in HUMCEA_PEA_{—}1_P5 (SEQ ID NO:865).

[0638] According to preferred embodiments of the present invention, there is provided an isolated chimeric polypeptide encoding for HUMCEA_PEA_{—}1_P7 (SEQ ID NO:866), comprising a first amino acid sequence being at least 90% homologous to MESPSAPPHRWCIPWQRLLLTASLLTFWNPPTTAKLTIESTPFNVAEGKEVLLLVHNLPQ HLFGYSWYKGERVDGNRQIIGYVIGTQQATPGPAYSGREIIYPNASLLIQNIIQNDTGFYT LHVIKSDLVNEEATGQFRVYPELPKPSISSNNSKPVEDKDAVAFTCEPETQDATYLWWV NNQSLPVSPRLQLSNGNRTLTLFNVTRNDTASYKCETQNPVSARRSDSVILNVLYGPDA PTISPLNTSYRSGENLNLSCHAASNPPAQYSWFVNGTFQQSTQELFIPNITVNNSGSYTC QAHNSDTGLNRTTVTTITVYAEPPKPFITSNNSNPVEDEDAVALTCEPEIQNTTYLWWV NNQSLPVSPRLQLSNDNRTLTLLSVTRNDVGPYECGIQNELSVDHSDPVILNVLYGPDD PTISPSYTYYRPGVNLSLSCHAASNPPAQYSWLIDGNIQQHTQELFISNITEKNSGLYTCQ ANNSASGHSRTTVKTITVSAELPKPSISSNNSKPVEDKDAVAFTCEPEAQNTTYLWWVN GQSLPVSPRLQLSNGNRTLTLFNVTRNDARAYVCGIQNSVSANRSDPVTLDVLYGPDTP IISPPDSSYLSGANLNLSCHSASNPSPQYSWRINGIPQQHTQVLFIAKITPNNNGTYACFV SNLATGRNNSIVKSITV corresponding to amino acids 1-674 of CEA5_HUMAN (SEQ ID NO:863), which also corresponds to amino acids 1-674 of HUMCEA_PEA_{—}1_P7 (SEQ ID NO:866), and a second amino acid sequence being at least 90% homologous to SAGATVGIMIGVLVGVALI corresponding to amino acids 684-702 of CEA5_HUMAN (SEQ ID NO:863), which also corresponds to amino acids 675-693 of HUMCEA_PEA_{—}1_P7 (SEQ ID NO:866), wherein said first amino acid sequence and second amino acid sequence are contiguous and in a sequential order.

[0639] According to preferred embodiments of the present invention, there is provided an isolated chimeric polypeptide encoding for an edge portion of HUMCEA_PEA_{—}1_P7 (SEQ ID NO:866), comprising a polypeptide having a length “n”, wherein n is at least about 10 amino acids in length, optionally at least about 20 amino acids in length, preferably at least about 30 amino acids in length, more preferably at least about 40 amino acids in length and most preferably at least about 50 amino acids in length, wherein at least two amino acids comprise VS, having a structure as follows: a sequence starting from any of amino acid numbers 674−x to 674; and ending at any of amino acid numbers 675+((n−2)−x), in which x varies from 0 to n−2.

[0640] According to preferred embodiments of the present invention, there is provided an isolated chimeric polypeptide encoding for HUMCEA_PEA_{—}1_P10 (SEQ ID NO:867), comprising a first amino acid sequence being at least 90% homologous to MESPSAPPHRWCIPWQRLLLTASLLTFWNPPTTAKLTIESTPFNVAEGKEVLLLVHNLPQ HLFGYSWYKGERVDGNRQIIGYVIGTQQATPGPAYSGREIIYPNASLLIQNIIQNDTGFYT LHVIKSDLVNEEATGQFRVYPELPKPSISSNNSKPVEDKDAVAFTCEPETQDATYLWWV NNQSLPVSPRLQLSNGNRTLTLFNVTRNDTASYKCETQNPVSARRSDS corresponding to amino acids 1-228 of CEA5_HUMAN (SEQ ID NO:863), which also corresponds to amino acids 1-228 of HUMCEA_PEA_{—}1_P10 (SEQ ID NO:867), and a second amino acid sequence being at least 90% homologous to VILNVLYGPDDPTISPSYTYYRPGVNLSLSCHAASNPPAQYSWLIDGNIQQHTQELFISNI TEKNSGLYTCQANNSASGHSRTTVKTITVSAELPKPSISSNNSKPVEDKDAVAFTCEPEA QNTTYLWWVNGQSLPVSPRLQLSNGNRTLTLFNVTRNDARAYVCGIQNSVSANRSDPV TLDVLYGPDTPIISPPDSSYLSGANLNLSCHSASNPSPQYSWRINGIPQQHTQVLFIAKITP NNNGTYACFVSNLATGRNNSIVKSITVSASGTSPGLSAGATVGIMIGVLVGVALI corresponding to amino acids 407-702 of CEA5_HUMAN (SEQ ID NO:863), which also corresponds to amino acids 229-524 of HUMCEA_PEA_{—}1_P10 (SEQ ID NO:867), wherein said first amino acid sequence and second amino acid sequence are contiguous and in a sequential order.

[0641] According to preferred embodiments of the present invention, there is provided an isolated chimeric polypeptide encoding for an edge portion of HUMCEA_PEA_{—}1_P10 (SEQ ID NO:867), comprising a polypeptide having a length “n”, wherein n is at least about 10 amino acids in length, optionally at least about 20 amino acids in length, preferably at least about 30 amino acids in length, more preferably at least about 40 amino acids in length and most preferably at least about 50 amino acids in length, wherein at least two amino acids comprise SV, having a structure as follows: a sequence starting from any of amino acid numbers 228−x to 228; and ending at any of amino acid numbers 229+((n−2)−x), in which x varies from 0 to n−2.

[0642] According to preferred embodiments of the present invention, there is provided an isolated chimeric polypeptide encoding for HUMCEA_PEA_{—}1_P19 (SEQ ID NO:869), comprising a first amino acid sequence being at least 90% homologous to MESPSAPPHRWCIPWQRLLLTASLLTFWNPPTTAKLTIESTPFNVAEGKEVLLLVHNLPQ HLFGYSWYKGERVDGNRQIIGYVIGTQQATPGPAYSGREIIYPNASLLIQNIIQNDTGFYT LHVIKSDLVNEEATGQFRVYPELPKPSISSNNSKPVEDKDAVAFTCEPETQDATYLWWV NNQSLPVSPRLQLSNGNRTLTLFNVTRNDTASYKCETQNPVSARRSDSVILN corresponding to amino acids 1-232 of CEA5_HUMAN (SEQ ID NO:863), which also corresponds to amino acids 1-232 of HUMCEA_PEA_{—}1_P19 (SEQ ID NO:869), and a second amino acid sequence being at least 90% homologous to VLYGPDTPIISPPDSSYLSGANLNLSCHSASNPSPQYSWRINGIPQQHTQVLFIAKITPNNN GTYACFVSNLATGRNNSIVKSITVSASGTSPGLSAGATVGIMIGVLVGVALI corresponding to amino acids 589-702 of CEA5_HUMAN (SEQ ID NO:863), which also corresponds to amino acids 233-346 of HUMCEA_PEA_{—}1_P19 (SEQ ID NO:869), wherein said first amino acid sequence and second amino acid sequence are contiguous and in a sequential order.

[0643] According to preferred embodiments of the present invention, there is provided an isolated chimeric polypeptide encoding for an edge portion of HUMCEA_PEA_{—}1_P19 (SEQ ID NO:869), comprising a polypeptide having a length “n”, wherein n is at least about 10 amino acids in length, optionally at least about 20 amino acids in length, preferably at least about 30 amino acids in length, more preferably at least about 40 amino acids in length and most preferably at least about 50 amino acids in length, wherein at least two amino acids comprise NV, having a structure as follows: a sequence starting from any of amino acid numbers 232−x to 232; and ending at any of amino acid numbers 233+((n−2)−x), in which x varies from 0 to n−2.

[0644] According to preferred embodiments of the present invention, there is provided an isolated chimeric polypeptide encoding for HUMCEA_PEA_{—}1_P20 (SEQ ID NO:870), comprising a first amino acid sequence being at least 90% homologous to MESPSAPPHRWCIPWQRLLLTASLLTFWNPPTTAKLTIESTPFNVAEGKEVLLLVHNLPQ HLFGYSWYKGERVDGNRQIIGYVIGTQQATPGPAYSGREIIYPNASLLIQNIIQNDTGFYT LHVIKSDLVNEEATGQFRVYP corresponding to amino acids 1-142 of CEA5_HUMAN (SEQ ID NO:863), which also corresponds to amino acids 1-142 of HUMCEA_PEA_{—}1_P20 (SEQ ID NO:870), and a second amino acid sequence being at least 90% homologous to ELPKPSISSNNSKPVEDKDAVAFTCEPEAQNTTYLWWVNGQSLPVSPRLQLSNGNRTLT LFNVTRNDARAYVCGIQNSVSANRSDPVTLDVLYGPDTPIISPPDSSYLSGANLNLSCHS ASNPSPQYSWRINGIPQQHTQVLFIAKITPNNNGTYACFVSNLATGRNNSIVKSITVSASG TSPGLSAGATVGIMIGVLVGVALI corresponding to amino acids 499-702 of CEA5_HUMAN (SEQ ID NO:863), which also corresponds to amino acids 143-346 of HUMCEA_PEA_{—}1_P20 (SEQ ID NO:870), wherein said first amino acid sequence and second amino acid sequence are contiguous and in a sequential order.

[0645] According to preferred embodiments of the present invention, there is provided an isolated chimeric polypeptide encoding for an edge portion of HUMCEA_PEA_{—}1_P20 (SEQ ID NO:870), comprising a polypeptide having a length “n”, wherein n is at least about 10 amino acids in length, optionally at least about 20 amino acids in length, preferably at least about 30 amino acids in length, more preferably at least about 40 amino acids in length and most preferably at least about 50 amino acids in length, wherein at least two amino acids comprise PE, having a structure as follows: a sequence starting from any of amino acid numbers 142−x to 142; and ending at any of amino acid numbers 143+((n−2)−x), in which x varies from 0 to n−2.

[0646] According to preferred embodiments of the present invention, there is provided an isolated chimeric polypeptide encoding for HUMCACH1A_PEA_{—}1_P7 (SEQ ID NO:796), comprising a first amino acid sequence being at least 90% homologous to MPTSETESVNTENVSGEGENRGCCGSL corresponding to amino acids 466-492 of CCAD_HUMAN_V3 (SEQ ID NO:791), which also corresponds to amino acids 1-27 of HUMCACH1A_PEA_{—}1_P7 (SEQ ID NO:796), a second amino acid sequence being at least 70%, optionally at least 80%, preferably at least 85%, more preferably at least 90% and most preferably at least 95% homologous to a polypeptide having the sequence WCWWRRRGAAKAGPSGCRRWG corresponding to amino acids 28-48 of HUMCACH1A_PEA_{—}1_P7 (SEQ ID NO:796), and a third amino acid sequence being at least 90% homologous to QAISKSKLSRRWRRWNRFNRRRCRAAVKSVTFYWLVIVLVFLNTLTISSEHYNQPDWL TQIQDIANKVLLALFTCEMLVKMYSLGLQAYFVSLFNRFDCFVVCGGITETILVELEIMS PLGISVFRCVRLLRIFKVTRHWTSLSNLVASLLNSMKSIASLLLLLFLFIIIFSLLGMQLFG GKFNFDETQTKRSTFDNFPQALLTVFQILTGEDWNAVMYDGIMAYGGPSSSGMIVCIYF IILFICGNYILLNVFLAIAVDNLADAESLNTAQKEEAEEKERKKIARKESLENKKNNKPE VNQIANSDNKVTIDDYREEDEDKDPYPPCDVPVGEEEEEEEEDEPEVPAGPRPRRISELN MKEKIAPIPEGSAFFILSKTNPIRVGCHKLINHHIFTNLILVFIMLSSAALAAEDPIRSHSFR NTILGYFDYAFTAIFTVEILLKMTTFGAFLHKGAFCRNYFNLLDMLVVGVSLVSFGIQSS AISVVKILRVLRVLRPLRAINRAKGLKHVVQCVFVAIRTIGNIMIVTTLLQFMFACIGVQ LFKGKFYRCTDEAKSNPEECRGLFILYKDGDVDSPVVRERIWQNSDFNFDNVLSAMMA LFTVSTFEGWPALLYKAIDSNGENIGPIYNHRVEISIFFIIYIIIVAFFMMNIFVGFVIVTFQE QGEKEYKNCELDKNQRQCVEYALKARPLRRYIPKNPYQYKFWYVVNS SPFEYMMFVL IMLNTLCLAMQHYEQSKMFNDAMDILNMVFTGVFTVEMVLKVIAFKPKGYFSDAWNT FDSLIVIGSIIDVALSEADPTESENVPVPTATPGNSEESNRISITFFRLFRVMRLVKLLSRGE GIRTLLWTFIKSFQALPYVALLIAMLFFIYAVIGMQMFGKVAMRDNNQINRNNNFQTFP QAVLLLFRCATGEAWQEIMLACLPGKLCDPESDYNPGEEYTCGSNFAIVYFISFYMLCA FLIINLFVAVIMDNFDYLTRDWSILGPHHLDEFKRIWSEYDPEAKGRIKHLDVVTLLRRI QPPLGFGKLCPHRVACKRLVAMNMPLNSDGTVMFNATLFALVRTALKIKTEGNLEQA NEELRAVIKKIWKKTSMKLLDQVVPPAGDDEVTVGKFYATFLIQDYFRKFKKRKEQGL VGKYPAKNTTIALQAGLRTLHDIGPEIRRAISCDLQDDEPEETKREEEDDVFKRNGALLG NHVNHVNSDRRDSLQQTNTTHRPLHVQRPSIPPASDTEKPLFPPAGNSVCHNHHNHNSI GKQVPTSTNANLNNANMSKAAHGKRPSIGNLEHVSENGHHSSHKHDREPQRRSSVKRT RYYETYIRSDSGDEQLPTICREDPEIHGYFRDPHCLGEQEYFSSEECYEDDSSPTWSRQN YGYYSRYPGRNIDSERPRGYHHPQGFLEDDDSPVCYDSRRSPRRRLLPPTPASHRRSSFN FECLRRQSSQEEVPSSPIFPHRTALPLHLMQQQIMAVAGLDSSKAQKYSPSHSTRSWATP PATPPYRDWTPCYTPLIQVEQSEALDQVNGSLPSLHRSSWYTDEPDISYRTFTPASLTVP SSFRNKNSDKQRSADSLVEAVLISEGLGRYARDPKFVSATKHEIADACDLTIDEMESAA STLLNGNVRPRANGDVGPLSHRQDYELQDFGPGYSDEEPDPGRDEEDLADEMICITTL corresponding to amino acids 494-2161 of CCAD_HUMAN_V3 (SEQ ID NO:791), which also corresponds to amino acids 49-1716 of HUMCACH1A_PEA_{—}1_P7 (SEQ ID NO:796), wherein said first amino acid sequence, second amino acid sequence and third amino acid sequence are contiguous and in a sequential order.

[0647] According to preferred embodiments of the present invention, there is provided an isolated polypeptide encoding for an edge portion of HUMCACH1A_PEA_{—}1_P7 (SEQ ID NO:796), comprising an amino acid sequence being at least 70%, optionally at least about 80%, preferably at least about 85%, more preferably at least about 90% and most preferably at least about 95% homologous to the sequence encoding for WCWWRRRGAAKAGPSGCRRWG, corresponding to HUMCACH1A_PEA_{—}1_P7 (SEQ ID NO:796).

[0648] According to preferred embodiments of the present invention, there is provided a bridge portion of HUMCACH1A_PEA_{—}1_P7 (SEQ ID NO:796), comprising a polypeptide having a length “n”, wherein n is at least about 10 amino acids in length, optionally at least about 20 amino acids in length, preferably at least about 30 amino acids in length, more preferably at least about 40 amino acids in length and most preferably at least about 50 amino acids in length, wherein at least two amino acids comprise L, having a structure as follows (numbering according to HUMCACH1A_PEA_{—}1_P7 (SEQ ID NO:796)): a sequence starting from any of amino acid numbers 492−x to 492; and ending at any of amino acid numbers 28+((n−2)−x), in which x varies from 0 to n−2.

[0649] According to preferred embodiments of the present invention, there is provided an isolated chimeric polypeptide encoding for HUMCACH1A_PEA_{—}1_P13 (SEQ ID NO:802), comprising a first amino acid sequence being at least 70%, optionally at least 80%, preferably at least 85%, more preferably at least 90% and most preferably at least 95% homologous to a polypeptide having the sequence MLRPRCLLRRTAHPPHSAPAPAPARSKCLGSWSNVLIRESSVWSLRL (SEQ ID NO:1477) corresponding to amino acids 1-47 of HUMCACH1A_PEA_{—}1_P13 (SEQ ID NO:802), and a second amino acid sequence being at least 90% homologous to DDEVTVGKFYATFLIQDYFRKFKKRKEQGLVGKYPAKNTTIALQAGLRTLHDIGPEIRR AISCDLQDDEPEETKREEEDDVFKRNGALLGNHVNHVNSDRRDSLQQTNTTHRPLHVQ RPSIPPASDTEKPLFPPAGNSVCHNHHNHNSIGKQVPTSTNANLNNANMSKAAHGKRPS IGNLEHVSENGHHSSHKHDREPQRRSSVKRTRYYETYIRSDSGDEQLPTICREDPEIHGY FRDPHCLGEQEYFSSEECYEDDSSPTWSRQNYGYYSRYPGRNIDSERPRGYHHPQGFLE DDDSPVCYDSRRSPRRRLLPPTPASHRRSSFNFECLRRQSSQEEVPSSPIFPHRTALPLHL MQQQIMAVAGLDSSKAQKYSPSHSTRSWATPPATPPYRDWTPCYTPLIQVEQSEALDQ VNGSLPSLHRSSWYTDEPDISYRTFTPASLTVPSSFRNKNSDKQRSADSLVEAVLISEGL GRYARDPKFVSATKHEIADACDLTIDEMESAASTLLNGNVRPRANGDVGPLSHRQDYE LQDFGPGYSDEEPDPGRDEEDLADEMICITTL corresponding to amino acids 1598-2161 of CCAD_HUMAN (SEQ ID NO:790), which also corresponds to amino acids 48-611 of HUMCACH1A_PEA_{—}1_P13 (SEQ ID NO:802), wherein said first amino acid sequence and second amino acid sequence are contiguous and in a sequential order.

[0650] According to preferred embodiments of the present invention, there is provided an isolated polypeptide encoding for a head of HUMCACH1A_PEA_{—}1_P13 (SEQ ID NO:802), comprising a polypeptide being at least 70%, optionally at least about 80%, preferably at least about 85%, more preferably at least about 90% and most preferably at least about 95% homologous to the sequence MLRPRCLLRRTAHPPHSAPAPAPARSKCLGSWSNVLIRESSVWSLRL (SEQ ID NO:1477) of HUMCACH1A_PEA_{—}1_P13 (SEQ ID NO:802).

[0651] According to preferred embodiments of the present invention, there is provided an isolated chimeric polypeptide encoding for HUMCACHLA_PEA_{—}1_P14 (SEQ ID NO:803), comprising a first amino acid sequence being at least 90% homologous to MSKAAHGKRPSIGNLEHVSENGHHSSHKHDREPQRRSSVKRTRYYETYIRSDSGDEQLP TICREDPEIHGYFRDPHCLGEQEYFSSEECYEDDSSPTWSRQNYGYYSRYPGRNIDSERP RGYHHPQGFLEDDDSPVCYDSRRSPRRRLLPPTPASHRRSSFNFECLRRQSSQEEVPSSPI FPHRTALPLHLMQQQIMAVAGLDSSKAQKYSPSHSTRSWATPPATPPYRDWTPCYTPLI QVEQSEALDQVNGSLPSLHRSSWYTDEPDISYRTFTPASLTVPSSFRNKNSDKQRSADSL VEAVLISEGLGRYARDPKFVSATKHEIADACDLTIDEMESAASTLLNGNVRPRANGDVG PLSHRQDYELQDFGPGYSDEEPDPGRDEEDLADEMICITTL corresponding to amino acids 1763-2161 of CCAD_HUMAN (SEQ ID NO:790), which also corresponds to amino acids 1-399 of HUMCACH1A_PEA_{—}1_P14 (SEQ ID NO:803).

[0652] According to preferred embodiments of the present invention, there is provided an isolated chimeric polypeptide encoding for HUMCACH1A_PEA_{—}1_P17 (SEQ ID NO:805), comprising a first amino acid sequence being at least 90% homologous to MMMMMMMKKMQHQRQQQADHANEANYARGTRLPLSGEGPTSQPNSSKQTVLSWQ AAIDAARQAKAAQTMSTSAPPPVGSLSQRKRQQYAKSKKQGNSSNSRPARALFCLSLN NPIRRACISIVEWKPFDIFILLAIFANCVALAIYIPFPEDDSNSTNHNLEKVEYAFLIIFTVET FLKIIAYGLLLHPNAYVRNGWNLLDFVIVIVGLFSVILEQLTKETEGGNHSSGKSGGFDV KALRAFRVLRPLRLVSGVPSLQVVLNSIIKAMVPLLHIALLVLFVIIIYAIIGLELFIGKMH KTCFFADSDIVAEEDPAPCAFSGNGRQCTANGTECRSGWVGPNGGITNFDNFAFAMLT VFQCITMEGWTDVLYWMNDAMGFELPWVYFVSLVIFGSFFVLNLVLGVLSG corresponding to amino acids 1-407 of CCAD_HUMAN (SEQ ID NO:790), which also corresponds to amino acids 1-407 of HUMCACH1A_PEA_{—}1_P17 (SEQ ID NO:805), and a second amino acid sequence being at least 70%, optionally at least 80%, preferably at least 85%, more preferably at least 90% and most preferably at least 95% homologous to a polypeptide having the sequence HGGSRL (SEQ ID NO:1478) corresponding to amino acids 408-413 of HUMCACH1A_PEA_{—}1_P17 (SEQ ID NO:805), wherein said first amino acid sequence and second amino acid sequence are contiguous and in a sequential order.

[0653] According to preferred embodiments of the present invention, there is provided an isolated polypeptide encoding for a tail of HUMCACH1A_PEA_{—}1_P17 (SEQ ID NO:805), comprising a polypeptide being at least 70%, optionally at least about 80%, preferably at least about 85%, more preferably at least about 90% and most preferably at least about 95% homologous to the sequence HGGSRL (SEQ ID NO:1478) in HUMCACH1A_PEA_{—}1_P17 (SEQ ID NO:805).

[0654] According to preferred embodiments of the present invention, there is provided an isolated chimeric polypeptide encoding for AA583399_PEA_{—}1_P2 (SEQ ID NO:684), comprising a first amino acid sequence being at least 90% homologous to MFTRQAGHFVEGSKAGRSRGRLCLSQALRVAVRGAFVSLWFAAGAGDRERNKGDKG AQTGAGLSQEAEDVDVSRARRVTDAPQGTLCGTGNRNSGSQSARVVGVAHLGEAFRV GVEQAISSCPEEVHGRHGLSMEIMWARMDVALRSPGRGLLAGAGALCMTLAESSCPD YERGRRACLTLHRHPTPHCSTWGLPLRVAGSWLTVVTVEALGGWRMGVRRTGQVGP TMHPPPVSGASPLLLHHLLLLLLIIILTC corresponding to amino acids 59-313 of MYEO_HUMAN_V1 (SEQ ID NO:680), which also corresponds to amino acids 1-255 of AA583399_PEA_{—}1_P2 (SEQ ID NO:684).

[0655] According to preferred embodiments of the present invention, there is provided an isolated chimeric polypeptide encoding for AA583399_PEA_{—}1_P4 (SEQ ID NO:685), comprising a first amino acid sequence being at least 70%, optionally at least 80%, preferably at least 85%, more preferably at least 90% and most preferably at least 95% homologous to a polypeptide having the sequence MSDLFIGFLVCSLSPLGTGTRCSCSPG (SEQ ID NO:1479) corresponding to amino acids 1-27 of AA583399_PEA_{—}1_P4 (SEQ ID NO:685), and a second amino acid sequence being at least 90% homologous to RNSGSQSARVVGVAHLGEAFRVGVEQAISSCPEEVHGRHGLSMEIMWARMDVALRSP GRGLLAGAGALCMTLAESSCPDYERGRRACLTLHRHPTPHCSTWGLPLRVAGSWLTV VTVEALGGWRMGVRRTGQVGPTMHPPPVSGASPLLLHHLLLLLLIIILTC corresponding to amino acids 150-313 of MYEO_HUMAN_V1 (SEQ ID NO:680), which also corresponds to amino acids 28-191 of AA583399_PEA_{—}1_P4 (SEQ ID NO:685), wherein said first amino acid sequence and second amino acid sequence are contiguous and in a sequential order.

[0656] According to preferred embodiments of the present invention, there is provided an isolated polypeptide encoding for a head of AA583399_PEA_{—}1_P4 (SEQ ID NO:685), comprising a polypeptide being at least 70%, optionally at least about 80%, preferably at least about 85%, more preferably at least about 90% and most preferably at least about 95% homologous to the sequence MSDLFIGFLVCSLSPLGTGTRCSCSPG (SEQ ID NO:1479) of AA583399_PEA_{—}1_P4 (SEQ ID NO:685).

[0657] According to preferred embodiments of the present invention, there is provided an isolated chimeric polypeptide encoding for AA583399_PEA_{—}1_P5 (SEQ ID NO:686), comprising a first amino acid sequence being at least 90% homologous to MEIMWARMDVALRSPGRGLLAGAGALCMTLAESSCPDYERGRRACLTLHRHPTPHCS TWGLPLRVAGSWLTVVTVEALGGWRMGVRRTGQVGPTMHPPPVSGASPLLLHHLLLL LLIIILTC corresponding to amino acids 192-313 of MYEO_HUMAN_V2 (SEQ ID NO:681), which also corresponds to amino acids 1-122 of AA583399_PEA_{—}1_P5 (SEQ ID NO:686).

[0658] According to preferred embodiments of the present invention, there is provided an isolated chimeric polypeptide encoding for AA583399_PEA_{—}1_P10 (SEQ ID NO:689), comprising a first amino acid sequence being at least 90% homologous to MFTRQAGHFVEGSKAGRSRGRLCLSQALRVAVRGAFVSLWFAAGAGDRERNKGDKG AQTGAGLSQEAEDVDVSRARRVTDAPQGTLCGTGNRNSGSQSARAVGVAHLGEAFRV GVEQAISSCPEEVHGRHGLSMEIMWAQMDVALRSPGRGLLAGAGALCMTLAESSCPD YERGRRACLTLHRHPTPHCSTWGLPLRVAGSWLTVVTVEALGRWRMGVRRTGQVGPT MHPPPVSGASPLLLHHLLLLLLIIILTC corresponding to amino acids 59-313 of MYEO_HUMAN_V3 (SEQ ID NO:682), which also corresponds to amino acids 1-255 of AA583399_PEA_{—}1_P10 (SEQ ID NO:689).

[0659] According to preferred embodiments of the present invention, there is provided an antibody capable of specifically binding to an epitope of an amino acid sequence as described herein.

[0660] Optionally the amino acid sequence corresponds to a bridge, edge portion, tail, head or insertion as described herein.

[0661] Optionally the antibody is capable of differentiating between a splice variant having said epitope and a corresponding known protein.

[0662] According to preferred embodiments of the present invention, there is provided a kit for detecting colon cancer, comprising a kit detecting overexpression of a splice variant as described herein.

[0663] Optionally the kit comprises a NAT-based technology.

[0664] Optionally said the kit further comprises at least one primer pair capable of selectively hybridizing to a nucleic acid sequence as described herein. Optionally the kit further comprises at least one oligonucleotide capable of selectively hybridizing to a nucleic acid sequence as described herein. The kit optionally comprises an antibody as described herein. The kit optionally further comprises at least one reagent for performing an ELISA or a Western blot.

[0665] There is optionally provided a method for detecting colon cancer, comprising detecting overexpression of a splice variant as described herein. Detecting overexpression is optionally performed with a NAT-based technology.

[0666] Optionally s detecting overexpression is performed with an immunoassay, optionally wherein said immunoassay comprises an antibody as described herein. A biomarker capable of detecting colon cancer, comprising any of the above nucleic acid sequences or a fragment thereof, or any of the above amino acid sequences or a fragment thereof. A method for screening for colon cancer, comprising detecting colon cancer cells with a biomarker or an antibody or a method or assay as described herein. A method for diagnosing colon cancer, comprising detecting colon cancer cells with a biomarker or an antibody or a method or assay as described herein. A method for monitoring disease progression and/or treatment efficacy and/or relapse of colon cancer, comprising detecting colon cancer cells with a biomarker or an antibody or a method or assay as described herein. A method of selecting a therapy for colon cancer, comprising detecting colon cancer cells with a biomarker or an antibody or a method or assay as described herein and selecting a therapy according to said detection.

[0667] According to preferred embodiments of the present invention, preferably any of the above nucleic acid and/or amino acid sequences further comprises any sequence having at least about 70%, preferably at least about 80%, more preferably at least about 90%, most preferably at least about 95% homology thereto.

[0668] Unless otherwise noted, all experimental data relates to variants of the present invention, named according to the segment being tested (as expression was tested through RT-PCR as described).

[0669] All nucleic acid sequences and/or amino acid sequences shown herein as embodiments of the present invention relate to their isolated form, as isolated polynucleotides (including for all transcripts), oligonucleotides (including for all segments, amplicons and primers), peptides (including for all tails, bridges, insertions or heads, optionally including other antibody epitopes as described herein) and/or polypeptides (including for all proteins). It should be noted that oligonucleotide and polynucleotide, or peptide and polypeptide, may optionally be used interchangeably.

[0670] Unless defined otherwise, all technical and scientific terms used herein have the meaning commonly understood by a person skilled in the art to which this invention belongs. The following references provide one of skill with a general definition of many of the terms used in this invention: Singleton et al., Dictionary of Microbiology and Molecular Biology (2nd ed. 1994); The Cambridge Dictionary of Science and Technology (Walker ed., 1988); The Glossary of Genetics, 5th Ed., R. Rieger et al. (eds.), Springer Verlag (1991); and Hale & Marham, The Harper Collins Dictionary of Biology (1991). All of these are hereby incorporated by reference as if fully set forth herein. As used herein, the following terms have the meanings ascribed to them unless specified otherwise.

### BRIEF DESCRIPTION OF DRAWINGS

[0671] FIG. 1. is schematic summary of cancer biomarkers selection engine and the wet validation stages.

[0672] FIG. 2. Schematic illustration, depicting grouping of transcripts of a given cluster based on presence or absence of unique sequence regions.

[0673] FIG. 3 is schematic summary of quantitative real-time PCR analysis.

[0674] FIG. 4 is schematic presentation of the oligonucleotide based microarray fabrication.

[0675] FIG. 5 is schematic summary of the oligonucleotide based microarray experimental flow.

[0676] FIG. 6 is a histogram showing Cancer and cell-line vs. normal tissue expression for Cluster M85491.

[0677] FIG. 7 is a histogram showing expression of the Ephrin type-B receptor 2 precursor (EC 2.7.1.112) (Tyrosine-protein kinase receptor EPH-3) M85491 transcripts which are detectable by amplicon as depicted in sequence name M85491seg24 (SEQ ID NO:1276) in normal and cancerous colon tissues.

[0678] FIG. 8 is a histogram showing the expression of M85491 transcripts which are detectable by amplicon as depicted in sequence name M85491seg24 (SEQ ID NO:1276) in different normal tissues.

[0679] FIG. 9 is histogram, showing Cancer and cell-line vs. normal tissue expression for Cluster T10888, demonstrating overexpression in colorectal cancer, a mixture of malignant tumors from different tissues, pancreas carcinoma and gastric carcinoma.

[0680] FIG. 10 is a histogram showing expression of the CEA6_HUMAN Carcinoembryonic antigen-related cell adhesion molecule 6 (T10888) transcripts which are detectable by amplicon as depicted in sequence name T10888 junc11-17 (SEQ ID NO:1279), in normal and cancerous colon tissues.

[0681] FIG. 11 is a the histogram showing the expression of T10888 transcripts, which are detectable by amplicon as depicted in sequence name T10888junc11-17 (SEQ ID NO:1282), in different normal tissues.

[0682] FIG. 12 is a histogram showing Cancer and cell-line vs. normal tissue expression for Cluster H14624.

[0683] FIG. 13 is a histogram, showing Cancer and cell-line vs. normal tissue expression for Cluster H53626, demonstrating overexpression in the epithelial malignant tumors, a mixture of malignant tumors from different tissues and myosarcoma.

[0684] FIG. 14 is a histogram showing expression of the above-indicated Homo sapiens fibroblast growth factor receptor-like 1 (FGFRL1) H53626 transcripts, which are detectable by amplicon as depicted in sequence name H53626 junc24-27F1R3 (SEQ ID NO:1285), in normal and cancerous colon tissues.

[0685] FIG. 15 is the expression of Homo sapiens fibroblast growth factor receptor-like 1 (FGFRL1) H53626 transcripts, which are detectable by amplicon as depicted in sequence name H53626seg25 (SEQ ID NO:1288), in normal and cancerous colon tissues.

[0686] FIG. 16 is a a histogram, showing Cancer and cell-line vs. normal tissue expression for Cluster HSENA78, demonstrating overexpression in the epithelial malignant tumors and lung malignant tumors.

[0687] FIG. 17 is a histogram, showing Cancer and cell-line vs. normal tissue expression for the Cluster HUMODCA, demonstrating overexpression in the brain malignant tumors, colorectal cancer, epithelial malignant tumors and a mixture of malignant tumors from different tissues.

[0688] FIG. 18 is a histogram, showing Cancer and cell-line vs. normal tissue expression for the cluster R00299, demonstratin overexpression in the lung malignant tumors.

[0689] FIG. 19 is the histograms showing Cancer and cell-line vs. normal tissue expression for the cluster Z44808, demonstrating overexpression in the colorectal cancer, lung cancer and pancreas carcinoma.

[0690] FIG. 20 is the histograms showing Cancer and cell-line vs. normal tissue expression for the cluster Z25299, demonstrating overexpression in the brain malignant tumors, a mixture of malignant tumors from different tissues and ovarian carcinoma.

[0691] FIG. 21 is a histogram showing expression of Z25299 transcripts, which are detectable by amplicon as depicted in sequence name Z25299seg20 (SEQ ID NO:1294), in normal and cancerous colon tissues.

[0692] FIG. 22 is a histogram showing the expression of Secretory leukocyte protease inhibitor Acid-stable proteinase inhibitor with strong affinities for trypsin, chymotrypsin, elastase, and cathepsin G. May prevent elastase-mediated damage to oral and possibly other mucosal tissues Z25299 transcripts which are detectable by amplicon as depicted in sequence name Z25299seg20 (SEQ ID NO:1294) in different normal tissues.

[0693] FIG. 23 is the histograms showing Cancer and cell-line vs. normal tissue expression for the cluster HUMANK, demonstrating overexpression in epithelial malignant tumors.

[0694] FIG. 24 is the histograms showing Cancer and cell-line vs. normal tissue expression for the cluster HUMCA1XIA, demonstrating overexpression in the bone malignant tumors, epithelial malignant tumors, a mixture of malignant tumors from different tissues and lung malignant tumors.

[0695] FIG. 25 is the histograms showing Cancer and cell-line vs. normal tissue expression for the cluster HSS100PCB, demonstrating overexpression in the mixture of malignant tumors from different tissues.

[0696] FIG. 26 is the histograms showing Cancer and cell-line vs. normal tissue expression for the cluster D11853, demonstrating overexpression in the brain malignant tumors, colorectal cancer and a mixture of malignant tumors from different tissues.

[0697] FIG. 27 is the histograms showing Cancer and cell-line vs. normal tissue expression for the cluster R11723, demonstrating overexpression in the epithelial malignant tumors, a mixture of malignant tumors from different tissues and kidney malignant tumors FIG. 28 is the histogram showing expression of the R11723 transcripts, which are detectable by amplicon as depicted in sequence name R11723 seg13 (SEQ ID NO:1297) in normal and cancerous colon tissues.

[0698] FIG. 29 is the histogram showing expression of the R11723 transcripts, which are detectable by amplicon as depicted in sequence name R11723 junc11-18 (SEQ ID NO:1300) in normal and cancerous colon tissues.

[0699] FIG. 30 is the histogram showing the expression of R11723 transcripts, detectable by amplicon depicted in sequence name R11723seg13 (SEQ ID NO:1297) in different normal tissues.

[0700] FIG. 31 is the histogram showing the expression of R11723 transcripts, detectable by amplicon in sequence name R11723 junc11-18 (SEQ ID NO:1300) in different normal tissues.

[0701] FIG. 32 is a histogram showing over expression of the SMO2_HUMAN SPARC related modular calcium-binding protein 2 precursor (Secreted modular calcium-binding protein 2) (SMOC-2) (Smooth muscle-associated protein 2) Z44808 transcripts which are detectable by amplicon as depicted in sequence name Z44808junc8-11 (SEQ ID NO:1291) in cancerous colon samples relative to the normal samples

[0702] FIG. 33 is the histograms showing Cancer and cell-line vs. normal tissue expression for the cluster M77903, demonstrating overexpression in ovarian carcinoma and uterine malignancies.

[0703] FIG. 34 is the histogram showing expression of the SSR-alpha M77903 transcripts, which are detectable by amplicon, as depicted in sequence name M77903seg18 (SEQ ID NO: 1303) in normal and cancerous colon tissues.

[0704] FIG. 35 is the histogram showing low over expression for amplicon M77903 junc20-34-35(SEQ ID NO:1309) in the experiment carried out with colon.

[0705] FIG. 36 is the histogram showing low over expression for amplicon M77903 junc20-28 (SEQ ID NO:1306) in the experiment carried out with colon

[0706] FIGS. 37-38 are histograms showing differential expression of 6 sequences: (M85491seg24 (SEQ ID NO:1276), M77903 seg18 (SEQ ID NO:1303), M77903junc20-28 (SEQ ID NO:1306), Z44808 junc8-11 (SEQ ID NO:1291), Z25299 seg 20 (SEQ ID NO:1294) and HSKITCR seg3 (SEQ ID NO:1309) in normal and cancerous colon tissues, in different combinations.

[0707] FIG. 39 is a histogram showing the expression of SMO2_HUMAN SPARC related modular calcium-binding protein 2 precursor (Secreted modular calcium-binding protein 2) (SMOC-2) (Smooth muscle-associated protein 2) Z44808 transcripts which are detectable by amplicon as depicted in sequence name Z44808 junc8-11 (SEQ ID NO:1291) in different normal tissues.

[0708] FIG. 40 is the histogram showing Cancer and cell-line vs. normal tissue expression for the cluster AA583399, demonstrating overexpression in brain malignant tumors, epithelial malignant tumors, a mixture of malignant tumors from different tissues and gastric carcinoma.

[0709] FIG. 41 is the histogram showing expression of the AA583399 transcripts, which are detectable by amplicon as depicted in sequence name AA583399seg30-32 (SEQ ID NO:1321), in normal and cancerous colon tissues.

[0710] FIG. 42 is the histogram showing expression of the AA583399 transcripts which are detectable by amplicon as depicted in sequence name AA583399seg17 (SEQ ID NO:1324) in normal and cancerous colon tissues.

[0711] FIG. 43 is the histogram showing expression of the AA583399 transcripts which are detectable by amplicon as depicted in sequence name AA583399seg1 (SEQ ID NO:1327) in normal and cancerous colon tissues.

[0712] FIG. 44 is the histogram showing Cancer and cell-line vs. normal tissue expression for the cluster AI684092, demonstrating overexpression in brain malignant tumors, epithelial malignant tumors and a mixture of malignant tumors from different tissues.

[0713] FIG. 45 is the histogram showing expression of the AA5315457 transcripts which are detectable by amplicon as depicted in sequence name AA5315457seg8 (SEQ ID NO:1330) in normal and cancerous colon tissues.

[0714] FIG. 46 is the histogram showing Cancer and cell-line vs. normal tissue expression for the cluster HUMCACH1A, demonstrating overexpression in a mixture of malignant tumors from different tissues.

[0715] FIG. 47 is the histogram showing expression of the Voltage-dependent L-type calcium channel alpha-1D subunit Calcium channel, L type, alpha-1 polypeptide, isoform 2 Transcripts, which are detectable by seg 113, 35, 109, 125, in normal and cancerous colon tissues.

[0716] FIG. 48 is the histogram showing expression of the HUMCACH1A Transcripts, which are detectable by amplicon as depicted in sequence name HUMCACH1Aseg101 (SEQ ID NO: 1337), in normal and cancerous colon tissues.

[0717] FIG. 49 is the histogram showing Cancer and cell-line vs. normal tissue expression for the cluster HUMCEA, demonstrating overexpression in epithelial malignant tumors, a mixture of malignant tumors from different tissues and pancreas carcinoma.

[0718] FIG. 50 is the histogram showing expression of the HUMCEA transcripts which are detectable by seg12 and seg9, in normal and cancerous colon tissues.

[0719] FIG. 51 is the histogram showing expression of the Carcinoembryonic antigen-related cell adhesion molecule 5 CEACAM5 HUMCEA transcripts which are detectable by amplicon as depicted in sequence name HUMCEA seg31 (SEQ ID NO:1342) in normal and cancerous colon tissues.

[0720] FIG. 52 is the histogram showing expression of the Carcinoembryonic antigen-related cell adhesion molecule 5 CEACAM5 HUMCEA transcripts which are detectable by amplicon as depicted in sequence name HUMCEA seg33 (SEQ ID NO:1345) in normal and cancerous colon tissues.

[0721] FIG. 53 is the histogram showing expression of the Carcinoembryonic antigen-related cell adhesion molecule 5 CEACAM5 HUMCEA transcripts which are detectable by amplicon as depicted in sequence name HUMCEA seg35 (SEQ ID NO:1348) in normal and cancerous colon tissues.

[0722] FIG. 54 is the histogram showing Cancer and cell-line vs. normal tissue expression for the cluster M78035, demonstrating overexpression in brain malignant tumors, colorectal cancer, epithelial malignant tumors, a mixture of malignant tumors from different tissues, malignant tumors involving the lymph nodes and pancreas carcinoma.

[0723] FIG. 55 is the histogram showing expression of the S-adenosylhomocysteine hydrolase (AHCY) M78035 transcripts, which are detectable by amplicon as depicted in sequence name M78035seg42 (SEQ ID NO:1351), in normal and cancerous colon tissues

[0724] FIG. 56 is the histogram showing Cancer and cell-line vs. normal tissue expression for the cluster R30650, demonstrating overexpression in epithelial malignant tumors and a mixture of malignant tumors from different tissues.

[0725] FIG. 57 is the histogram showing expression of the R30650 transcripts which are detectable by amplicon as depicted in sequence name R30650 seg76 (SEQ ID NO:1354) in normal and cancerous colon tissues.

[0726] FIG. 58 is the histogram showing Cancer and cell-line vs. normal tissue expression for the cluster T23657, demonstrating overexpression in epithelial malignant tumors.

[0727] FIG. 59 is the histogram showing expression of solute carrier organic anion transporter family, member 4A1 (SLCO4A1) T23657 transcripts, which are detectable by amplicon as depicted in sequence name T23657 seg17-18 (SEQ ID NO:1357), in normal and cancerous colon tissues.

[0728] FIG. 60 is the histogram showing expression of solute carrier organic anion transporter family, member 4A1 (SLCO4A1) T23657 transcripts, which are detectable by amplicon as depicted in sequence name T23657 seg22 (SEQ ID NO:1360), in normal and cancerous colon tissues.

[0729] FIG. 61 is the histogram showing expression of solute carrier organic anion transporter family, member 4A1 (SLCO4A1) T23657 transcripts, which are detectable by amplicon as depicted in sequence name T23657 seg29-32 (SEQ ID NO:1363), in normal and cancerous colon tissues.

[0730] FIG. 62 is the histogram showing expression of solute carrier organic anion transporter family, member 4A1 (SLCO4A1) T23657 transcripts, which are detectable by amplicon as depicted in sequence name T23657 seg41 (SEQ ID NO:1366), in normal and cancerous colon tissues.

[0731] FIG. 63 is the histogram showing Cancer and cell-line vs. normal tissue expression for the cluster T51958, demonstrating overexpression in epithelial malignant tumors and a mixture of malignant tumors from different tissues.

[0732] FIG. 64 is the histogram showing expression of PTK7 protein tyrosine kinase 7 (PTK7) T51958 transcripts which are detectable by amplicon as depicted in sequence name T 51958seg38 (SEQ ID NO:1369) in normal and cancerous colon tissues.

[0733] FIG. 65 is the histogram showing expression of PTK7 protein tyrosine kinase 7 (PTK7) T51958 transcripts which are detectable by amplicon as depicted in sequence name T 51958seg7 (SEQ ID NO:1372) in normal and cancerous colon tissues.

[0734] FIG. 66 is the histogram showing Cancer and cell-line vs. normal tissue expression for the cluster Z17877, demonstrating overexpression in brain malignant tumors and malignant tumors involving the bone marrow.

[0735] FIG. 67 is the histogram showing expression of c-myc-P64 mRNA, initiating from promoter P0 Z17877 transcripts, which are detectable by amplicon as depicted in sequence name Z17877seg8 (SEQ ID NO:1375), in normal and cancerous colon tissues.

[0736] FIG. 68 is the histogram showing combined expression of 19 sequences (T23657seg 29 (SEQ ID NO:1363), T23657seg 22 (SEQ ID NO:1360), T23657seg 41 (SEQ ID NO:1366), T23657seg17-18 (SEQ ID NO:1357), AA315457seg8, R30650seg76 (SEQ ID NO:1354), HUM-CEASeg 33 (SEQ ID NO:1345), CEA-Seg35 (SEQ ID NO:1348), CEA-Seg31 (SEQ ID NO:1342), AA583399seg1 (SEQ ID NO:1327), AA583399seg17 (SEQ ID NO:1324), AA58339-seg30-32 (SEQ ID NO:1321), HUMCACH1Aseg101 (SEQ ID NO:1337), HSHCGI seg20 (SEQ ID NO: 1378), HSHCGI seg35 (SEQ ID NO:1381), M78035seg 42 (SEQ ID NO: 1351), T51958seg7 (SEQ ID NO:1372), T51958 seg3 (SEQ ID NO:1369) and, Z17877 seg8 (SEQ ID NO:1375)) in normal and cancerous colon tissues.

[0737] FIG. 69 is the histogram showing expression of TRIM31 tripartite motif HSHCGI transcripts which are detectable by amplicon as depicted in sequence name HSHCGI seg20 (SEQ ID NO:1378) in normal and cancerous colon tissues.

[0738] FIG. 70 is the histogram showing expression of TRIM31 tripartite motif HSHCGI transcripts which are detectable by amplicon as depicted in sequence name HSHCGI seg35 (SEQ ID NO:1381) in normal and cancerous colon tissues.

[0739] FIG. 71 is a histogram showing the expression of fibroblast growth factor receptor-like 1 (FGFRL1) transcripts detectable by or according to H53626 seg25 (SEQ ID NO:1288) amplicon(s) and H53626 seg25F (SEQ ID NO:1286) and H53626 seg25R (SEQ ID NO:1287) in different normal tissues.

[0740] FIG. 72 is a histogram showing the expression of fibroblast growth factor receptor-like 1 (FGFRL1) transcripts detectable by or according to H53626 seg25 (SEQ ID NO:1285) amplicon(s) and H53626 seg25F (SEQ ID NO:1283) and H53626 junc24-27F1R3 (SEQ ID NO:1284) in different normal tissues.

[0741] FIG. 73 is a histogram showing over expression of the Matrix metalloproteinase 11 (stromelysin 3) (MMP11) transcripts, which are detectable by amplicon as depicted in sequence name HSSTROL3 junc21-27 (SEQ ID NO:1312), in cancerous colon samples relative to the normal samples.

[0742] FIG. 74 is a histogram showing over expression of the Matrix metalloproteinase 11 (stromelysin 3) (MMP11) transcripts, which are detectable by amplicon as depicted in sequence name HSSTROL3 seg25 (SEQ ID NO:1315), in cancerous colon samples relative to the normal samples.

[0743] FIG. 75 is the histogram showing Cancer and cell-line vs. normal tissue expression for the cluster HSSTROL3, demonstrating overexpression in transitional cell carcinoma, epithelial malignant tumors, a mixture of malignant tumors from different tissues and pancreas carcinoma.

[0744] FIG. 76 is a histogram showing the expression of of Stromelysin-3 HSSTROL3 transcripts, which are detectable by amplicon as depicted in sequence name HSSTROL3 seg24, in different normal tissues.

### DESCRIPTION OF PREFERRED EMBODIMENTS

[0745] The present invention is of novel markers for colon cancer that are both sensitive and accurate. Biomolecular sequences (amino acid and/or nucleic acid sequences) uncovered using the methodology of the present invention and described herein can be efficiently utilized as tissue or pathological markers and/or as drugs or drug targets for treating or preventing a disease.

[0746] These markers are specifically released to the bloodstream under conditions of colon cancer and/or other colon pathology, and/or are otherwise expressed at a much higher level and/or specifically expressed in colon cancer tissue or cells. The measurement of these markers, alone or in combination, in patient samples provides information that the diagnostician can correlate with a probable diagnosis of colon cancer and/or pathology.

[0747] The present invention therefore also relates to diagnostic assays for colon cancer and/or colon pathology, and methods of use of such markers for detection of colon cancer and/or colon pathology, optionally and preferably in a sample taken from a subject (patient), which is more preferably some type of blood sample.

[0748] In another embodiment, the present invention relates to bridges, tails, heads and/or insertions, and/or analogs, homologs and derivatives of such peptides. Such bridges, tails, heads and/or insertions are described in greater detail below with regard to the Examples.

[0749] As used herein a “tail” refers to a peptide sequence at the end of an amino acid sequence that is unique to a splice variant according to the present invention. Therefore, a splice variant having such a tail may optionally be considered as a chimera, in that at least a first portion of the splice variant is typically highly homologous (often 100% identical) to a portion of the corresponding known protein, while at least a second portion of the variant comprises the tail.

[0750] As used herein a “head” refers to a peptide sequence at the beginning of an amino acid sequence that is unique to a splice variant according to the present invention. Therefore, a splice variant having such a head may optionally be considered as a chimera, in that at least a first portion of the splice variant comprises the head, while at least a second portion is typically highly homologous (often 100% identical) to a portion of the corresponding known protein.

[0751] As used herein “an edge portion” refers to a connection between two portions of a splice variant according to the present invention that were not joined in the wild type or known protein. An edge may optionally arise due to a join between the above “known protein” portion of a variant and the tail, for example, and/or may occur if an internal portion of the wild type sequence is no longer present, such that two portions of the sequence are now contiguous in the splice variant that were not contiguous in the known protein. A “bridge” may optionally be an edge portion as described above, but may also include a join between a head and a “known protein” portion of a variant, or a join between a tail and a “known protein” portion of a variant, or a join between an insertion and a “known protein” portion of a variant.

[0752] Optionally and preferably, a bridge between a tail or a head or a unique insertion, and a “known protein” portion of a variant, comprises at least about 10 amino acids, more preferably at least about 20 amino acids, most preferably at least about 30 amino acids, and even more preferably at least about 40 amino acids, in which at least one amino acid is from the tail/head/insertion and at least one amino acid is from the “known protein” portion of a variant. Also optionally, the bridge may comprise any number of amino acids from about 10 to about 40 amino acids (for example, 10, 11, 12, 13 . . . 37, 38, 39, 40 amino acids in length, or any number in between).

[0753] It should be noted that a bridge cannot be extended beyond the length of the sequence in either direction, and it should be assumed that every bridge description is to be read in such manner that the bridge length does not extend beyond the sequence itself.

[0754] Furthermore, bridges are described with regard to a sliding window in certain contexts below. For example, certain descriptions of the bridges feature the following format: a bridge between two edges (in which a portion of the known protein is not present in the variant) may optionally be described as follows: a bridge portion of CONTIG-NAME_P1 (representing the name of the protein), comprising a polypeptide having a length “n”, wherein n is at least about 10 amino acids in length, optionally at least about 20 amino acids in length, preferably at least about 30 amino acids in length, more preferably at least about 40 amino acids in length and most preferably at least about 50 amino acids in length, wherein at least two amino acids comprise XX (2 amino acids in the center of the bridge, one from each end of the edge), having a structure as follows (numbering according to the sequence of CONTIG-NAME_P1): a sequence starting from any of amino acid numbers 49−x to 49 (for example); and ending at any of amino acid numbers 50+((n−2)−x) (for example), in which x varies from 0 to n−2. In this example, it should also be read as including bridges in which n is any number of amino acids between 10-50 amino acids in length. Furthermore, the bridge polypeptide cannot extend beyond the sequence, so it should be read such that 49−x (for example) is not less than 1, nor 50+((n−2)−x) (for example) greater than the total sequence length.

[0755] In another embodiment, this invention provides antibodies specifically recognizing the splice variants and polypeptide fragments thereof of this invention. Preferably such antibodies differentially recognize splice variants of the present invention but do not recognize a corresponding known protein (such known proteins are discussed with regard to their splice variants in the Examples below).

[0756] In another embodiment, this invention provides an isolated nucleic acid molecule encoding for a splice variant according to the present invention, having a nucleotide sequence as set forth in any one of the sequences listed herein, or a sequence complementary thereto. In another embodiment, this invention provides an isolated nucleic acid molecule, having a nucleotide sequence as set forth in any one of the sequences listed herein, or a sequence complementary thereto. In another embodiment, this invention provides an oligonucleotide of at least about 12 nucleotides, specifically hybridizable with the nucleic acid molecules of this invention. In another embodiment, this invention provides vectors, cells, liposomes and compositions comprising the isolated nucleic acids of this invention.

[0757] In another embodiment, this invention provides a method for detecting a splice variant according to the present invention in a biological sample, comprising: contacting a biological sample with an antibody specifically recognizing a splice variant according to the present invention under conditions whereby the antibody specifically interacts with the splice variant in the biological sample but do not recognize known corresponding proteins (wherein the known protein is discussed with regard to its splice variant(s) in the Examples below), and detecting said interaction; wherein the presence of an interaction correlates with the presence of a splice variant in the biological sample.

[0758] In another embodiment, this invention provides a method for detecting a splice variant nucleic acid sequences in a biological sample, comprising: hybridizing the isolated nucleic acid molecules or oligonucleotide fragments of at least about a minimum length to a nucleic acid material of a biological sample and detecting a hybridization complex; wherein the presence of a hybridization complex correlates with the presence of a splice variant nucleic acid sequence in the biological sample.

[0759] According to the present invention, the splice variants described herein are non-limiting examples of markers for diagnosing colon cancer and/or colon pathology. Each splice variant marker of the present invention can be used alone or in combination, for various uses, including but not limited to, prognosis, prediction, screening, early diagnosis, determination of progression, therapy selection and treatment monitoring of colon cancer and/or colon pathology.

[0760] According to optional but preferred embodiments of the present invention, any marker according to the present invention may optionally be used alone or combination. Such a combination may optionally comprise a plurality of markers described herein, optionally including any subcombination of markers, and/or a combination featuring at least one other marker, for example a known marker. Furthermore, such a combination may optionally and preferably be used as described above with regard to determining a ratio between a quantitative or semi-quantitative measurement of any marker described herein to any other marker described herein, and/or any other known marker, and/or any other marker. With regard to such a ratio between any marker described herein (or a combination thereof) and a known marker, more preferably the known marker comprises the “known protein” as described in greater detail below with regard to each cluster or gene.

[0761] According to other preferred embodiments of the present invention, a splice variant protein or a fragment thereof, or a splice variant nucleic acid sequence or a fragment thereof, may be featured as a biomarker for detecting colon cancer and/or colon pathology, such that a biomarker may optionally comprise any of the above.

[0762] According to still other preferred embodiments, the present invention optionally and preferably encompasses any amino acid sequence or fragment thereof encoded by a nucleic acid sequence corresponding to a splice variant protein as described herein. Any oligopeptide or peptide relating to such an amino acid sequence or fragment thereof may optionally also (additionally or alternatively) be used as a biomarker, including but not limited to the unique amino acid sequences of these proteins that are depicted as tails, heads, insertions, edges or bridges. The present invention also optionally encompasses antibodies capable of recognizing, and/or being elicited by, such oligopeptides or peptides.

[0763] The present invention also optionally and preferably encompasses any nucleic acid sequence or fragment thereof, or amino acid sequence or fragment thereof, corresponding to a splice variant of the present invention as described above, optionally for any application.

[0764] Non-limiting examples of methods or assays are described below.

[0765] The present invention also relates to kits based upon such diagnostic methods or assays.

Nucleic Acid Sequences and Oligonucleotides

[0766] Various embodiments of the present invention encompass nucleic acid sequences described hereinabove; fragments thereof, sequences hybridizable therewith, sequences homologous thereto, sequences encoding similar polypeptides with different codon usage, altered sequences characterized by mutations, such as deletion, insertion or substitution of one or more nucleotides, either naturally occurring or artificially induced, either randomly or in a targeted fashion.

[0767] The present invention encompasses nucleic acid sequences described herein; fragments thereof, sequences hybridizable therewith, sequences homologous thereto [e.g., at least 50%, at least 55%, at least 60%, at least 65%, at least 70%, at least 75%, at least 80%, at least 85%, at least 95% or more say 100% identical to the nucleic acid sequences set forth below], sequences encoding similar polypeptides with different codon usage, altered sequences characterized by mutations, such as deletion, insertion or substitution of one or more nucleotides, either naturally occurring or man induced, either randomly or in a targeted fashion. The present invention also encompasses homologous nucleic acid sequences (i.e., which form a part of a polynucleotide sequence of the present invention) which include sequence regions unique to the polynucleotides of the present invention.

[0768] In cases where the polynucleotide sequences of the present invention encode previously unidentified polypeptides, the present invention also encompasses novel polypeptides or portions thereof, which are encoded by the isolated polynucleotide and respective nucleic acid fragments thereof described hereinabove.

[0769] A “nucleic acid fragment” or an “oligonucleotide” or a “polynucleotide” are used herein interchangeably to refer to a polymer of nucleic acids. A polynucleotide sequence of the present invention refers to a single or double stranded nucleic acid sequences which is isolated and provided in the form of an RNA sequence, a complementary polynucleotide sequence (cDNA), a genomic polynucleotide sequence and/or a composite polynucleotide sequences (e.g., a combination of the above).

[0770] As used herein the phrase “complementary polynucleotide sequence” refers to a sequence, which results from reverse transcription of messenger RNA using a reverse transcriptase or any other RNA dependent DNA polymerase. Such a sequence can be subsequently amplified in vivo or in vitro using a DNA dependent DNA polymerase.

[0771] As used herein the phrase “genomic polynucleotide sequence” refers to a sequence derived (isolated) from a chromosome and thus it represents a contiguous portion of a chromosome.

[0772] As used herein the phrase “composite polynucleotide sequence” refers to a sequence, which is composed of genomic and cDNA sequences. A composite sequence can include some exonal sequences required to encode the polypeptide of the present invention, as well as some intronic sequences interposing therebetween. The intronic sequences can be of any source, including of other genes, and typically will include conserved splicing signal sequences. Such intronic sequences may further include cis acting expression regulatory elements.

[0773] Preferred embodiments of the present invention encompass oligonucleotide probes.

[0774] An example of an oligonucleotide probe which can be utilized by the present invention is a single stranded polynucleotide which includes a sequence complementary to the unique sequence region of any variant according to the present invention, including but not limited to a nucleotide sequence coding for an amino sequence of a bridge, tail, head and/or insertion according to the present invention, and/or the equivalent portions of any nucleotide sequence given herein (including but not limited to a nucleotide sequence of a node, segment or amplicon described herein).

[0775] Alternatively, an oligonucleotide probe of the present invention can be designed to hybridize with a nucleic acid sequence encompassed by any of the above nucleic acid sequences, particularly the portions specified above, including but not limited to a nucleotide sequence coding for an amino sequence of a bridge, tail, head and/or insertion according to the present invention, and/or the equivalent portions of any nucleotide sequence given herein (including but not limited to a nucleotide sequence of a node, segment or amplicon described herein).

[0776] Oligonucleotides designed according to the teachings of the present invention can be generated according to any oligonucleotide synthesis method known in the art such as enzymatic synthesis or solid phase synthesis. Equipment and reagents for executing solid-phase synthesis are commercially available from, for example, Applied Biosystems. Any other means for such synthesis may also be employed; the actual synthesis of the oligonucleotides is well within the capabilities of one skilled in the art and can be accomplished via established methodologies as detailed in, for example, “Molecular Cloning: A laboratory Manual” Sambrook et al., (1989); “Current Protocols in Molecular Biology” Volumes I-III Ausubel, R. M., ed. (1994); Ausubel et al., “Current Protocols in Molecular Biology”, John Wiley and Sons, Baltimore, Md. (1989); Perbal, “A Practical Guide to Molecular Cloning”, John Wiley & Sons, New York (1988) and “Oligonucleotide Synthesis” Gait, M. J., ed. (1984) utilizing solid phase chemistry, e.g. cyanoethyl phosphoramidite followed by deprotection, desalting and purification by for example, an automated trityl-on method or HPLC.

[0777] Oligonucleotides used according to this aspect of the present invention are those having a length selected from a range of about 10 to about 200 bases preferably about 15 to about 150 bases, more preferably about 20 to about 100 bases, most preferably about 20 to about 50 bases. Preferably, the oligonucleotide of the present invention features at least 17, at least 18, at least 19, at least 20, at least 22, at least 25, at least 30 or at least 40, bases specifically hybridizable with the biomarkers of the present invention.

[0778] The oligonucleotides of the present invention may comprise heterocylic nucleosides consisting of purines and the pyrimidines bases, bonded in a 3′ to 5′ phosphodiester linkage.

[0779] Preferably used oligonucleotides are those modified at one or more of the backbone, internucleoside linkages or bases, as is broadly described hereinunder.

[0780] Specific examples of preferred oligonucleotides useful according to this aspect of the present invention include oligonucleotides containing modified backbones or non-natural internucleoside linkages. Oligonucleotides having modified backbones include those that retain a phosphorus atom in the backbone, as disclosed in U.S. Pat. Nos. 4,469,863; 4,476,301; 5,023,243; 5,177,196; 5,188,897; 5,264,423; 5,276,019; 5,278,302; 5,286,717; 5,321,131; 5,399,676; 5,405,939; 5,453,496; 5,455,233; 5,466, 677; 5,476,925; 5,519,126; 5,536,821; 5,541,306; 5,550,111; 5,563,253; 5,571,799; 5,587,361; and 5,625,050.

[0781] Preferred modified oligonucleotide backbones include, for example, phosphorothioates, chiral phosphorothioates, phosphorodithioates, phosphotriesters, aminoalkyl phosphotriesters, methyl and other alkyl phosphonates including 3′-alkylene phosphonates and chiral phosphonates, phosphinates, phosphoramidates including 3′-amino phosphoramidate and aminoalkylphosphoramidates, thionophosphoramidates, thionoalkylphosphonates, thionoalkylphosphotriesters, and boranophosphates having normal 3′-5′ linkages, 2′-5′ linked analogs of these, and those having inverted polarity wherein the adjacent pairs of nucleoside units are linked 3′-5′ to 5′-3′ or 2′-5′ to 5′-2′. Various salts, mixed salts and free acid forms can also be used.

[0782] Alternatively, modified oligonucleotide backbones that do not include a phosphorus atom therein have backbones that are formed by short chain alkyl or cycloalkyl internucleoside linkages, mixed heteroatom and alkyl or cycloalkyl internucleoside linkages, or one or more short chain heteroatomic or heterocyclic internucleoside linkages. These include those having morpholino linkages (formed in part from the sugar portion of a nucleoside); siloxane backbones; sulfide, sulfoxide and sulfone backbones; formacetyl and thioformacetyl backbones; methylene formacetyl and thioformacetyl backbones; alkene containing backbones; sulfamate backbones; methyleneimino and methylenehydrazino backbones; sulfonate and sulfonamide backbones; amide backbones; and others having mixed N, O, S and CH₂ component parts, as disclosed in U.S. Pat. Nos. 5,034,506; 5,166,315; 5,185,444; 5,214,134; 5,216,141; 5,235,033; 5,264,562; 5,264,564; 5,405,938; 5,434,257; 5,466,677; 5,470,967; 5,489,677; 5,541,307; 5,561,225; 5,596,086; 5,602,240; 5,610,289; 5,602,240; 5,608,046; 5,610,289; 5,618,704; 5,623,070; 5,663,312; 5,633,360; 5,677,437; and 5,677,439.

[0783] Other oligonucleotides which can be used according to the present invention, are those modified in both sugar and the internucleoside linkage, i.e., the backbone, of the nucleotide units are replaced with novel groups. The base units are maintained for complementation with the appropriate polynucleotide target. An example for such an oligonucleotide mimetic, includes peptide nucleic acid (PNA). United States patents that teach the preparation of PNA compounds include, but are not limited to, U.S. Pat. Nos. 5,539,082; 5,714,331; and 5,719,262, each of which is herein incorporated by reference. Other backbone modifications, which can be used in the present invention are disclosed in U.S. Pat. No. 6,303,374.

[0784] Oligonucleotides of the present invention may also include base modifications or substitutions. As used herein, “unmodified” or “natural” bases include the purine bases adenine (A) and guanine (G), and the pyrimidine bases thymine (T), cytosine (C) and uracil (U). Modified bases include but are not limited to other synthetic and natural bases such as 5-methylcytosine (5-me-C), 5-hydroxymethyl cytosine, xanthine, hypoxanthine, 2-aminoadenine, 6-methyl and other alkyl derivatives of adenine and guanine, 2-propyl and other alkyl derivatives of adenine and guanine, 2-thiouracil, 2-thiothymine and 2-thiocytosine, 5-halouracil and cytosine, 5-propynyl uracil and cytosine, 6-azo uracil, cytosine and thymine, 5-uracil (pseudouracil), 4-thiouracil, 8-halo, 8-amino, 8-thiol, 8-thioalkyl, 8-hydroxyl and other 8-substituted adenines and guanines, 5-halo particularly 5-bromo, 5-trifluoromethyl and other 5-substituted uracils and cytosines, 7-methylguanine and 7-methyladenine, 8-azaguanine and 8-azaadenine, 7-deazaguanine and 7-deazaadenine and 3-deazaguanine and 3-deazaadenine. Further bases particularly useful for increasing the binding affinity of the oligomeric compounds of the invention include 5-substituted pyrimidines, 6-azapyrimidines and N-2, N-6 and O-6 substituted purines, including 2-aminopropyladenine, 5-propynyluracil and 5-propynylcytosine. 5-methylcytosine substitutions have been shown to increase nucleic acid duplex stability by 0.6-1.2° C. and are presently preferred base substitutions, even more particularly when combined with 2′-O-methoxyethyl sugar modifications.

[0785] Another modification of the oligonucleotides of the invention involves chemically linking to the oligonucleotide one or more moieties or conjugates, which enhance the activity, cellular distribution or cellular uptake of the oligonucleotide. Such moieties include but are not limited to lipid moieties such as a cholesterol moiety, cholic acid, a thioether, e.g., hexyl-S-tritylthiol, a thiocholesterol, an aliphatic chain, e.g., dodecandiol or undecyl residues, a phospholipid, e.g., di-hexadecyl-rac-glycerol or triethylammonium 1,2-di-O-hexadecyl-rac-glycero-3-H-phosphonate, a polyamine or a polyethylene glycol chain, or adamantane acetic acid, a palmityl moiety, or an octadecylamine or hexylamino-carbonyl-oxycholesterol moiety, as disclosed in U.S. Pat. No. 6,303,374.

[0786] It is not necessary for all positions in a given oligonucleotide molecule to be uniformly modified, and in fact more than one of the aforementioned modifications may be incorporated in a single compound or even at a single nucleoside within an oligonucleotide.

[0787] It will be appreciated that oligonucleotides of the present invention may include further modifications for more efficient use as diagnostic agents and/or to increase bioavailability, therapeutic efficacy and reduce cytotoxicity.

[0788] To enable cellular expression of the polynucleotides of the present invention, a nucleic acid construct according to the present invention may be used, which includes at least a coding region of one of the above nucleic acid sequences, and further includes at least one cis acting regulatory element. As used herein, the phrase “cis acting regulatory element” refers to a polynucleotide sequence, preferably a promoter, which binds a trans acting regulator and regulates the transcription of a coding sequence located downstream thereto.

[0789] Any suitable promoter sequence can be used by the nucleic acid construct of the present invention.

[0790] Preferably, the promoter utilized by the nucleic acid construct of the present invention is active in the specific cell population transformed. Examples of cell type-specific and/or tissue-specific promoters include promoters such as albumin that is liver specific, lymphoid specific promoters [Calame et al., (1988) Adv. Immunol. 43:235-275]; in particular promoters of T-cell receptors [Winoto et al., (1989) EMBO J. 8:729-733] and immunoglobulins; [Baneji et al. (1983) Cell 33729-740], neuron-specific promoters such as the neurofilament promoter [Byrne et al. (1989) Proc. Natl. Acad. Sci. USA 86:5473-5477], pancreas-specific promoters [Edlunch et al. (1985) Science 230:912-916] or mammary gland-specific promoters such as the milk whey promoter (U.S. Pat. No. 4,873,316 and European Application Publication No. 264,166). The nucleic acid construct of the present invention can further include an enhancer, which can be adjacent or distant to the promoter sequence and can function in up regulating the transcription therefrom.

[0791] The nucleic acid construct of the present invention preferably further includes an appropriate selectable marker and/or an origin of replication. Preferably, the nucleic acid construct utilized is a shuttle vector, which can propagate both in E. coli (wherein the construct comprises an appropriate selectable marker and origin of replication) and be compatible for propagation in cells, or integration in a gene and a tissue of choice. The construct according to the present invention can be, for example, a plasmid, a bacmid, a phagemid, a cosmid, a phage, a virus or an artificial chromosome.

[0792] Examples of suitable constructs include, but are not limited to, pcDNA3, pcDNA3.1 (+/−), pGL3, PzeoSV2 (+/−), pDisplay, pEF/myc/cyto, pCMV/myc/cyto each of which is commercially available from Invitrogen Co. (www.invitrogen.com). Examples of retroviral vector and packaging systems are those sold by Clontech, San Diego, Calif., including Retro-X vectors pLNCX and pLXSN, which permit cloning into multiple cloning sites and the trasgene is transcribed from CMV promoter. Vectors derived from Mo-MuLV are also included such as pBabe, where the transgene will be transcribed from the 5′LTR promoter.

[0793] Currently preferred in vivo nucleic acid transfer techniques include transfection with viral or non-viral constructs, such as adenovirus, lentivirus, Herpes simplex I virus, or adeno-associated virus (AAV) and lipid-based systems. Useful lipids for lipid-mediated transfer of the gene are, for example, DOTMA, DOPE, and DC-Chol [Tonkinson et al., Cancer Investigation, 14(1): 54-65 (1996)]. The most preferred constructs for use in gene therapy are viruses, most preferably adenoviruses, AAV, lentiviruses, or retroviruses. A viral construct such as a retroviral construct includes at least one transcriptional promoter/enhancer or locus-defining element(s), or other elements that control gene expression by other means such as alternate splicing, nuclear RNA export, or post-translational modification of messenger. Such vector constructs also include a packaging signal, long terminal repeats (LTRs) or portions thereof, and positive and negative strand primer binding sites appropriate to the virus used, unless it is already present in the viral construct. In addition, such a construct typically includes a signal sequence for secretion of the peptide from a host cell in which it is placed. Preferably the signal sequence for this purpose is a mammalian signal sequence or the signal sequence of the polypeptide variants of the present invention. Optionally, the construct may also include a signal that directs polyadenylation, as well as one or more restriction sites and a translation termination sequence. By way of example, such constructs will typically include a 5′ LTR, a tRNA binding site, a packaging signal, an origin of second-strand DNA synthesis, and a 3′ LTR or a portion thereof. Other vectors can be used that are non-viral, such as cationic lipids, polylysine, and dendrimers.

Hybridization Assays

[0794] Detection of a nucleic acid of interest in a biological sample may optionally be effected by hybridization-based assays using an oligonucleotide probe (non-limiting examples of probes according to the present invention were previously described).

[0795] Traditional hybridization assays include PCR, RT-PCR, Real-time PCR, RNase protection, in-situ hybridization, primer extension, Southern blots (DNA detection), dot or slot blots (DNA, RNA), and Northern blots (RNA detection) (NAT type assays are described in greater detail below). More recently, PNAs have been described (Nielsen et al. 1999, Current Opin. Biotechnol. 10:71-75). Other detection methods include kits containing probes on a dipstick setup and the like.

[0796] Hybridization based assays which allow the detection of a variant of interest (i.e., DNA or RNA) in a biological sample rely on the use of oligonucleotides which can be 10, 15, 20, or 30 to 100 nucleotides long preferably from 10 to 50, more preferably from 40 to 50 nucleotides long.

[0797] Thus, the isolated polynucleotides (oligonucleotides) of the present invention are preferably hybridizable with any of the herein described nucleic acid sequences under moderate to stringent hybridization conditions.

[0798] Moderate to stringent hybridization conditions are characterized by a hybridization solution such as containing 10% dextrane sulfate, 1 M NaCl, 1% SDS and 5×10⁶ cpm ³²P labeled probe, at 65° C., with a final wash solution of 0.2×SSC and 0.1% SDS and final wash at 65° C. and whereas moderate hybridization is effected using a hybridization solution containing 10% dextrane sulfate, 1 M NaCl, 1% SDS and 5×10⁶ cpm ³²P labeled probe, at 65° C., with a final wash solution of 1×SSC and 0.1% SDS and final wash at 50° C.

[0799] More generally, hybridization of short nucleic acids (below 200 bp in length, e.g. 17-40 bp in length) can be effected using the following exemplary hybridization protocols which can be modified according to the desired stringency; (i) hybridization solution of 6×SSC and 1% SDS or 3 M TMACI, 0.01 M sodium phosphate (pH 6.8), 1 mM EDTA (pH 7.6), 0.5% SDS, 100 μg/ml denatured salmon sperm DNA and 0.1% nonfat dried milk, hybridization temperature of 1-1.5° C. below the Tₘ, final wash solution of 3 M TMACI, 0.01 M sodium phosphate (pH 6.8), 1 mM EDTA (pH 7.6), 0.5% SDS at 1-1.5° C. below the Tₘ; (ii) hybridization solution of 6×SSC and 0.1% SDS or 3 M TMACI, 0.01 M sodium phosphate (pH 6.8), 1 mM EDTA (pH 7.6), 0.5% SDS, 100 μg/ml denatured salmon sperm DNA and 0.1% nonfat dried milk, hybridization temperature of 2-2.5° C. below the Tₘ, final wash solution of 3 M TMACI, 0.01 M sodium phosphate (pH 6.8), 1 mM EDTA (pH 7.6), 0.5% SDS at 1-1.5° C. below the Tₘ, final wash solution of 6×SSC, and final wash at 22° C.; (iii) hybridization solution of 6×SSC and 1% SDS or 3 M TMACI, 0.01 M sodium phosphate (pH 6.8), 1 mM EDTA (pH 7.6), 0.5% SDS, 100 μg/ml denatured salmon sperm DNA and 0.1% nonfat dried milk, hybridization temperature.

[0800] The detection of hybrid duplexes can be carried out by a number of methods. Typically, hybridization duplexes are separated from unhybridized nucleic acids and the labels bound to the duplexes are then detected. Such labels refer to radioactive, fluorescent, biological or enzymatic tags or labels of standard use in the art. A label can be conjugated to either the oligonucleotide probes or the nucleic acids derived from the biological sample.

[0801] Probes can be labeled according to numerous well known methods. Non-limiting examples of radioactive labels include 3H, 14C, 32P, and 35S. Non-limiting examples of detectable markers include ligands, fluorophores, chemiluminescent agents, enzymes, and antibodies. Other detectable markers for use with probes, which can enable an increase in sensitivity of the method of the invention, include biotin and radio-nucleotides. It will become evident to the person of ordinary skill that the choice of a particular label dictates the manner in which it is bound to the probe.

[0802] For example, oligonucleotides of the present invention can be labeled subsequent to synthesis, by incorporating biotinylated dNTPs or rNTP, or some similar means (e.g., photo-cross-linking a psoralen derivative of biotin to RNAs), followed by addition of labeled streptavidin (e.g., phycoerythrin-conjugated streptavidin) or the equivalent. Alternatively, when fluorescently-labeled oligonucleotide probes are used, fluorescein, lissamine, phycoerythrin, rhodamine (Perkin Elmer Cetus), Cy2, Cy3, Cy3.5, Cy5, Cy5.5, Cy7, Fluor X (Amersham) and others [e.g., Kricka et al. (1992), Academic Press San Diego, Calif] can be attached to the oligonucleotides.

[0803] Those skilled in the art will appreciate that wash steps may be employed to wash away excess target DNA or probe as well as unbound conjugate. Further, standard heterogeneous assay formats are suitable for detecting the hybrids using the labels present on the oligonucleotide primers and probes.

[0804] It will be appreciated that a variety of controls may be usefully employed to improve accuracy of hybridization assays. For instance, samples may be hybridized to an irrelevant probe and treated with RNAse A prior to hybridization, to assess false hybridization.

[0805] Although the present invention is not specifically dependent on the use of a label for the detection of a particular nucleic acid sequence, such a label might be beneficial, by increasing the sensitivity of the detection. Furthermore, it enables automation. Probes can be labeled according to numerous well known methods.

[0806] As commonly known, radioactive nucleotides can be incorporated into probes of the invention by several methods. Non-limiting examples of radioactive labels include ³H, ¹⁴C, ³²P, and ³⁵S.

[0807] Those skilled in the art will appreciate that wash steps may be employed to wash away excess target DNA or probe as well as unbound conjugate. Further, standard heterogeneous assay formats are suitable for detecting the hybrids using the labels present on the oligonucleotide primers and probes.

[0808] It will be appreciated that a variety of controls may be usefully employed to improve accuracy of hybridization assays.

[0809] Probes of the invention can be utilized with naturally occurring sugar-phosphate backbones as well as modified backbones including phosphorothioates, dithionates, alkyl phosphonates and a-nucleotides and the like. Probes of the invention can be constructed of either ribonucleic acid (RNA) or deoxyribonucleic acid (DNA), and preferably of DNA.

NAT Assays

[0810] Detection of a nucleic acid of interest in a biological sample may also optionally be effected by NAT-based assays, which involve nucleic acid amplification technology, such as PCR for example (or variations thereof such as real-time PCR for example).

[0811] As used herein, a “primer” defines an oligonucleotide which is capable of annealing to (hybridizing with) a target sequence, thereby creating a double stranded region which can serve as an initiation point for DNA synthesis under suitable conditions.

[0812] Amplification of a selected, or target, nucleic acid sequence may be carried out by a number of suitable methods. See generally Kwoh et al., 1990, Am. Biotechnol. Lab. 8:14 Numerous amplification techniques have been described and can be readily adapted to suit particular needs of a person of ordinary skill. Non-limiting examples of amplification techniques include polymerase chain reaction (PCR), ligase chain reaction (LCR), strand displacement amplification (SDA), transcription-based amplification, the q3 replicase system and NASBA (Kwoh et al., 1989, Proc. NatI. Acad. Sci. USA 86, 1173-1177; Lizardi et al., 1988, BioTechnology 6:1197-1202; Malek et al., 1994, Methods Mol. Biol., 28:253-260; and Sambrook et al., 1989, supra).

[0813] The terminology “amplification pair” (or “primer pair”) refers herein to a pair of oligonucleotides (oligos) of the present invention, which are selected to be used together in amplifying a selected nucleic acid sequence by one of a number of types of amplification processes, preferably a polymerase chain reaction. Other types of amplification processes include ligase chain reaction, strand displacement amplification, or nucleic acid sequence-based amplification, as explained in greater detail below. As commonly known in the art, the oligos are designed to bind to a complementary sequence under selected conditions.

[0814] In one particular embodiment, amplification of a nucleic acid sample from a patient is amplified under conditions which favor the amplification of the most abundant differentially expressed nucleic acid. In one preferred embodiment, RT-PCR is carried out on an mRNA sample from a patient under conditions which favor the amplification of the most abundant mRNA. In another preferred embodiment, the amplification of the differentially expressed nucleic acids is carried out simultaneously. It will be realized by a person skilled in the art that such methods could be adapted for the detection of differentially expressed proteins instead of differentially expressed nucleic acid sequences.

[0815] The nucleic acid (i.e. DNA or RNA) for practicing the present invention may be obtained according to well known methods.

[0816] Oligonucleotide primers of the present invention may be of any suitable length, depending on the particular assay format and the particular needs and targeted genomes employed. Optionally, the oligonucleotide primers are at least 12 nucleotides in length, preferably between 15 and 24 molecules, and they may be adapted to be especially suited to a chosen nucleic acid amplification system. As commonly known in the art, the oligonucleotide primers can be designed by taking into consideration the melting point of hybridization thereof with its targeted sequence (Sambrook et al., 1989, Molecular Cloning—A Laboratory Manual, 2nd Edition, CSH Laboratories; Ausubel et al., 1989, in Current Protocols in Molecular Biology, John Wiley & Sons Inc., N.Y.).

[0817] It will be appreciated that antisense oligonucleotides may be employed to quantify expression of a splice isoform of interest. Such detection is effected at the pre-mRNA level. Essentially the ability to quantitate transcription from a splice site of interest can be effected based on splice site accessibility. Oligonucleotides may compete with splicing factors for the splice site sequences. Thus, low activity of the antisense oligonucleotide is indicative of splicing activity.

[0818] The polymerase chain reaction and other nucleic acid amplification reactions are well known in the art (various non-limiting examples of these reactions are described in greater detail below). The pair of oligonucleotides according to this aspect of the present invention are preferably selected to have compatible melting temperatures (Tm), e.g., melting temperatures which differ by less than that 7° C., preferably less than 5° C., more preferably less than 4° C., most preferably less than 3° C., ideally between 3° C. and 0° C.

[0819] Polymerase Chain Reaction (PCR): The polymerase chain reaction (PCR), as described in U.S. Pat. Nos. 4,683,195 and 4,683,202 to Mullis and Mullis et al., is a method of increasing the concentration of a segment of target sequence in a mixture of genomic DNA without cloning or purification. This technology provides one approach to the problems of low target sequence concentration. PCR can be used to directly increase the concentration of the target to an easily detectable level. This process for amplifying the target sequence involves the introduction of a molar excess of two oligonucleotide primers which are complementary to their respective strands of the double-stranded target sequence to the DNA mixture containing the desired target sequence. The mixture is denatured and then allowed to hybridize. Following hybridization, the primers are extended with polymerase so as to form complementary strands. The steps of denaturation, hybridization (annealing), and polymerase extension (elongation) can be repeated as often as needed, in order to obtain relatively high concentrations of a segment of the desired target sequence.

[0820] The length of the segment of the desired target sequence is determined by the relative positions of the primers with respect to each other, and, therefore, this length is a controllable parameter. Because the desired segments of the target sequence become the dominant sequences (in terms of concentration) in the mixture, they are said to be “PCR-amplified.”

[0821] Ligase Chain Reaction (LCR or LAR): The ligase chain reaction [LCR; sometimes referred to as “Ligase Amplification Reaction” (LAR)] has developed into a well-recognized alternative method of amplifying nucleic acids. In LCR, four oligonucleotides, two adjacent oligonucleotides which uniquely hybridize to one strand of target DNA, and a complementary set of adjacent oligonucleotides, which hybridize to the opposite strand are mixed and DNA ligase is added to the mixture. Provided that there is complete complementarity at the junction, ligase will covalently link each set of hybridized molecules. Importantly, in LCR, two probes are ligated together only when they base-pair with sequences in the target sample, without gaps or mismatches. Repeated cycles of denaturation, and ligation amplify a short segment of DNA. LCR has also been used in combination with PCR to achieve enhanced detection of single-base changes: see for example Segev, PCT Publication No. WO9001069 A1 (1990). However, because the four oligonucleotides used in this assay can pair to form two short ligatable fragments, there is the potential for the generation of target-independent background signal. The use of LCR for mutant screening is limited to the examination of specific nucleic acid positions.

[0822] Self-Sustained Synthetic Reaction (3SR/NASBA): The self-sustained sequence replication reaction (3SR) is a transcription-based in vitro amplification system that can exponentially amplify RNA sequences at a uniform temperature. The amplified RNA can then be utilized for mutation detection. In this method, an oligonucleotide primer is used to add a phage RNA polymerase promoter to the 5′ end of the sequence of interest. In a cocktail of enzymes and substrates that includes a second primer, reverse transcriptase, RNase H, RNA polymerase and ribo-and deoxyribonucleoside triphosphates, the target sequence undergoes repeated rounds of transcription, cDNA synthesis and second-strand synthesis to amplify the area of interest. The use of 3SR to detect mutations is kinetically limited to screening small segments of DNA (e.g., 200-300 base pairs).

[0823] Q-Beta (Qβ) Replicase: In this method, a probe which recognizes the sequence of interest is attached to the replicatable RNA template for Qβ replicase. A previously identified major problem with false positives resulting from the replication of unhybridized probes has been addressed through use of a sequence-specific ligation step. However, available thermostable DNA ligases are not effective on this RNA substrate, so the ligation must be performed by T4 DNA ligase at low temperatures (37 degrees C.). This prevents the use of high temperature as a means of achieving specificity as in the LCR, the ligation event can be used to detect a mutation at the junction site, but not elsewhere.

[0824] A successful diagnostic method must be very specific. A straight-forward method of controlling the specificity of nucleic acid hybridization is by controlling the temperature of the reaction. While the 3SR/NASBA, and Qβ systems are all able to generate a large quantity of signal, one or more of the enzymes involved in each cannot be used at high temperature (i.e., >55 degrees C.). Therefore the reaction temperatures cannot be raised to prevent non-specific hybridization of the probes. If probes are shortened in order to make them melt more easily at low temperatures, the likelihood of having more than one perfect match in a complex genome increases. For these reasons, PCR and LCR currently dominate the research field in detection technologies.

[0825] The basis of the amplification procedure in the PCR and LCR is the fact that the products of one cycle become usable templates in all subsequent cycles, consequently doubling the population with each cycle. The final yield of any such doubling system can be expressed as: (1+X)ⁿ=y, where “X” is the mean efficiency (percent copied in each cycle), “n” is the number of cycles, and “y” is the overall efficiency, or yield of the reaction. If every copy of a target DNA is utilized as a template in every cycle of a polymerase chain reaction, then the mean efficiency is 100%. If 20 cycles of PCR are performed, then the yield will be 2²⁰, or 1,048,576 copies of the starting material. If the reaction conditions reduce the mean efficiency to 85%, then the yield in those 20 cycles will be only 1.85²⁰, or 220,513 copies of the starting material. In other words, a PCR running at 85% efficiency will yield only 21% as much final product, compared to a reaction running at 100% efficiency. A reaction that is reduced to 50% mean efficiency will yield less than 1% of the possible product.

[0826] In practice, routine polymerase chain reactions rarely achieve the theoretical maximum yield, and PCRs are usually run for more than 20 cycles to compensate for the lower yield. At 50% mean efficiency, it would take 34 cycles to achieve the million-fold amplification theoretically possible in 20, and at lower efficiencies, the number of cycles required becomes prohibitive. In addition, any background products that amplify with a better mean efficiency than the intended target will become the dominant products.

[0827] Also, many variables can influence the mean efficiency of PCR, including target DNA length and secondary structure, primer length and design, primer and dNTP concentrations, and buffer composition, to name but a few. Contamination of the reaction with exogenous DNA (e.g., DNA spilled onto lab surfaces) or cross-contamination is also a major consideration. Reaction conditions must be carefully optimized for each different primer pair and target sequence, and the process can take days, even for an experienced investigator. The laboriousness of this process, including numerous technical considerations and other factors, presents a significant drawback to using PCR in the clinical setting. Indeed, PCR has yet to penetrate the clinical market in a significant way. The same concerns arise with LCR, as LCR must also be optimized to use different oligonucleotide sequences for each target sequence. In addition, both methods require expensive equipment, capable of precise temperature cycling.

[0828] Many applications of nucleic acid detection technologies, such as in studies of allelic variation, involve not only detection of a specific sequence in a complex background, but also the discrimination between sequences with few, or single, nucleotide differences. One method of the detection of allele-specific variants by PCR is based upon the fact that it is difficult for Taq polymerase to synthesize a DNA strand when there is a mismatch between the template strand and the 3′ end of the primer. An allele-specific variant may be detected by the use of a primer that is perfectly matched with only one of the possible alleles; the mismatch to the other allele acts to prevent the extension of the primer, thereby preventing the amplification of that sequence. This method has a substantial limitation in that the base composition of the mismatch influences the ability to prevent extension across the mismatch, and certain mismatches do not prevent extension or have only a minimal effect.

[0829] A similar 3′-mismatch strategy is used with greater effect to prevent ligation in the LCR. Any mismatch effectively blocks the action of the thermostable ligase, but LCR still has the drawback of target-independent background ligation products initiating the amplification. Moreover, the combination of PCR with subsequent LCR to identify the nucleotides at individual positions is also a clearly cumbersome proposition for the clinical laboratory.

[0830] The direct detection method according to various preferred embodiments of the present invention may be, for example a cycling probe reaction (CPR) or a branched DNA analysis.

[0831] When a sufficient amount of a nucleic acid to be detected is available, there are advantages to detecting that sequence directly, instead of making more copies of that target, (e.g., as in PCR and LCR). Most notably, a method that does not amplify the signal exponentially is more amenable to quantitative analysis. Even if the signal is enhanced by attaching multiple dyes to a single oligonucleotide, the correlation between the final signal intensity and amount of target is direct. Such a system has an additional advantage that the products of the reaction will not themselves promote further reaction, so contamination of lab surfaces by the products is not as much of a concern. Recently devised techniques have sought to eliminate the use of radioactivity and/or improve the sensitivity in automatable formats. Two examples are the “Cycling Probe Reaction” (CPR), and “Branched DNA” (bDNA).

[0832] Cycling probe reaction (CPR): The cycling probe reaction (CPR), uses a long chimeric oligonucleotide in which a central portion is made of RNA while the two termini are made of DNA. Hybridization of the probe to a target DNA and exposure to a thermostable RNase H causes the RNA portion to be digested. This destabilizes the remaining DNA portions of the duplex, releasing the remainder of the probe from the target DNA and allowing another probe molecule to repeat the process. The signal, in the form of cleaved probe molecules, accumulates at a linear rate. While the repeating process increases the signal, the RNA portion of the oligonucleotide is vulnerable to RNases that may carried through sample preparation.

[0833] Branched DNA: Branched DNA (bDNA), involves oligonucleotides with branched structures that allow each individual oligonucleotide to carry 35 to 40 labels (e.g., alkaline phosphatase enzymes). While this enhances the signal from a hybridization event, signal from non-specific binding is similarly increased.

[0834] The detection of at least one sequence change according to various preferred embodiments of the present invention may be accomplished by, for example restriction fragment length polymorphism (RFLP analysis), allele specific oligonucleotide (ASO) analysis, Denaturing/Temperature Gradient Gel Electrophoresis (DGGE/TGGE), Single-Strand Conformation Polymorphism (SSCP) analysis or Dideoxy fingerprinting (ddF).

[0835] The demand for tests which allow the detection of specific nucleic acid sequences and sequence changes is growing rapidly in clinical diagnostics. As nucleic acid sequence data for genes from humans and pathogenic organisms accumulates, the demand for fast, cost-effective, and easy-to-use tests for as yet mutations within specific sequences is rapidly increasing.

[0836] A handful of methods have been devised to scan nucleic acid segments for mutations. One option is to determine the entire gene sequence of each test sample (e.g., a bacterial isolate). For sequences under approximately 600 nucleotides, this may be accomplished using amplified material (e.g., PCR reaction products). This avoids the time and expense associated with cloning the segment of interest. However, specialized equipment and highly trained personnel are required, and the method is too labor-intense and expensive to be practical and effective in the clinical setting.

[0837] In view of the difficulties associated with sequencing, a given segment of nucleic acid may be characterized on several other levels. At the lowest resolution, the size of the molecule can be determined by electrophoresis by comparison to a known standard run on the same gel. A more detailed picture of the molecule may be achieved by cleavage with combinations of restriction enzymes prior to electrophoresis, to allow construction of an ordered map. The presence of specific sequences within the fragment can be detected by hybridization of a labeled probe, or the precise nucleotide sequence can be determined by partial chemical degradation or by primer extension in the presence of chain-terminating nucleotide analogs.

[0838] Restriction fragment length polymorphism (RFLP): For detection of single-base differences between like sequences, the requirements of the analysis are often at the highest level of resolution. For cases in which the position of the nucleotide in question is known in advance, several methods have been developed for examining single base changes without direct sequencing. For example, if a mutation of interest happens to fall within a restriction recognition sequence, a change in the pattern of digestion can be used as a diagnostic tool (e.g., restriction fragment length polymorphism [RFLP] analysis).

[0839] Single point mutations have been also detected by the creation or destruction of RFLPs. Mutations are detected and localized by the presence and size of the RNA fragments generated by cleavage at the mismatches. Single nucleotide mismatches in DNA heteroduplexes are also recognized and cleaved by some chemicals, providing an alternative strategy to detect single base substitutions, generically named the “Mismatch Chemical Cleavage” (MCC). However, this method requires the use of osmium tetroxide and piperidine, two highly noxious chemicals which are not suited for use in a clinical laboratory.

[0840] RFLP analysis suffers from low sensitivity and requires a large amount of sample. When RFLP analysis is used for the detection of point mutations, it is, by its nature, limited to the detection of only those single base changes which fall within a restriction sequence of a known restriction endonuclease. Moreover, the majority of the available enzymes have 4 to 6 base-pair recognition sequences, and cleave too frequently for many large-scale DNA manipulations. Thus, it is applicable only in a small fraction of cases, as most mutations do not fall within such sites.

[0841] A handful of rare-cutting restriction enzymes with 8 base-pair specificities have been isolated and these are widely used in genetic mapping, but these enzymes are few in number, are limited to the recognition of G+C-rich sequences, and cleave at sites that tend to be highly clustered. Recently, endonucleases encoded by group I introns have been discovered that might have greater than 12 base-pair specificity, but again, these are few in number.

[0842] Allele specific oligonucleotide (ASO): If the change is not in a recognition sequence, then allele-specific oligonucleotides (ASOs), can be designed to hybridize in proximity to the mutated nucleotide, such that a primer extension or ligation event can bused as the indicator of a match or a mis-match. Hybridization with radioactively labeled allelic specific oligonucleotides (ASO) also has been applied to the detection of specific point mutations. The method is based on the differences in the melting temperature of short DNA fragments differing by a single nucleotide. Stringent hybridization and washing conditions can differentiate between mutant and wild-type alleles. The ASO approach applied to PCR products also has been extensively utilized by various researchers to detect and characterize point mutations in ras genes and gsp/gip oncogenes. Because of the presence of various nucleotide changes in multiple positions, the ASO method requires the use of many oligonucleotides to cover all possible oncogenic mutations.

[0843] With either of the techniques described above (i.e., RFLP and ASO), the precise location of the suspected mutation must be known in advance of the test. That is to say, they are inapplicable when one needs to detect the presence of a mutation within a gene or sequence of interest.

[0844] Denaturing/Temperature Gradient Gel Electrophoresis (DGGE/TGGE): Two other methods rely on detecting changes in electrophoretic mobility in response to minor sequence changes. One of these methods, termed “Denaturing Gradient Gel Electrophoresis” (DGGE) is based on the observation that slightly different sequences will display different patterns of local melting when electrophoretically resolved on a gradient gel. In this manner, variants can be distinguished, as differences in melting properties of homoduplexes versus heteroduplexes differing in a single nucleotide can detect the presence of mutations in the target sequences because of the corresponding changes in their electrophoretic mobilities. The fragments to be analyzed, usually PCR products, are “clamped” at one end by a long stretch of G-C base pairs (30-80) to allow complete denaturation of the sequence of interest without complete dissociation of the strands. The attachment of a GC “clamp” to the DNA fragments increases the fraction of mutations that can be recognized by DGGE. Attaching a GC clamp to one primer is critical to ensure that the amplified sequence has a low dissociation temperature. Modifications of the technique have been developed, using temperature gradients, and the method can be also applied to RNA:RNA duplexes.

[0845] Limitations on the utility of DGGE include the requirement that the denaturing conditions must be optimized for each type of DNA to be tested. Furthermore, the method requires specialized equipment to prepare the gels and maintain the needed high temperatures during electrophoresis. The expense associated with the synthesis of the clamping tail on one oligonucleotide for each sequence to be tested is also a major consideration. In addition, long running times are required for DGGE. The long running time of DGGE was shortened in a modification of DGGE called constant denaturant gel electrophoresis (CDGE). CDGE requires that gels be performed under different denaturant conditions in order to reach high efficiency for the detection of mutations.

[0846] A technique analogous to DGGE, termed temperature gradient gel electrophoresis (TGGE), uses a thermal gradient rather than a chemical denaturant gradient. TGGE requires the use of specialized equipment which can generate a temperature gradient perpendicularly oriented relative to the electrical field. TGGE can detect mutations in relatively small fragments of DNA therefore scanning of large gene segments requires the use of multiple PCR products prior to running the gel.

[0847] Single-Strand Conformation Polymorphism (SSCP): Another common method, called “Single-Strand Conformation Polymorphism” (SSCP) was developed by Hayashi, Sekya and colleagues and is based on the observation that single strands of nucleic acid can take on characteristic conformations in non-denaturing conditions, and these conformations influence electrophoretic mobility. The complementary strands assume sufficiently different structures that one strand may be resolved from the other. Changes in sequences within the fragment will also change the conformation, consequently altering the mobility and allowing this to be used as an assay for sequence variations.

[0848] The SSCP process involves denaturing a DNA segment (e.g., a PCR product) that is labeled on both strands, followed by slow electrophoretic separation on a non-denaturing polyacrylamide gel, so that intra-molecular interactions can form and not be disturbed during the run. This technique is extremely sensitive to variations in gel composition and temperature. A serious limitation of this method is the relative difficulty encountered in comparing data generated in different laboratories, under apparently similar conditions.

[0849] Dideoxy fingerprinting (ddF): The dideoxy fingerprinting (ddF) is another technique developed to scan genes for the presence of mutations. The ddF technique combines components of Sanger dideoxy sequencing with SSCP. A dideoxy sequencing reaction is performed using one dideoxy terminator and then the reaction products are electrophoresed on nondenaturing polyacrylamide gels to detect alterations in mobility of the termination segments as in SSCP analysis. While ddF is an improvement over SSCP in terms of increased sensitivity, ddF requires the use of expensive dideoxynucleotides and this technique is still limited to the analysis of fragments of the size suitable for SSCP (i.e., fragments of 200-300 bases for optimal detection of mutations).

[0850] In addition to the above limitations, all of these methods are limited as to the size of the nucleic acid fragment that can be analyzed. For the direct sequencing approach, sequences of greater than 600 base pairs require cloning, with the consequent delays and expense of either deletion sub-cloning or primer walking, in order to cover the entire fragment. SSCP and DGGE have even more severe size limitations. Because of reduced sensitivity to sequence changes, these methods are not considered suitable for larger fragments. Although SSCP is reportedly able to detect 90% of single-base substitutions within a 200 base-pair fragment, the detection drops to less than 50% for 400 base pair fragments. Similarly, the sensitivity of DGGE decreases as the length of the fragment reaches 500 base-pairs. The ddF technique, as a combination of direct sequencing and SSCP, is also limited by the relatively small size of the DNA that can be screened.

[0851] According to a presently preferred embodiment of the present invention the step of searching for any of the nucleic acid sequences described here, in tumor cells or in cells derived from a cancer patient is effected by any suitable technique, including, but not limited to, nucleic acid sequencing, polymerase chain reaction, ligase chain reaction, self-sustained synthetic reaction, Qβ-Replicase, cycling probe reaction, branched DNA, restriction fragment length polymorphism analysis, mismatch chemical cleavage, heteroduplex analysis, allele-specific oligonucleotides, denaturing gradient gel electrophoresis, constant denaturant gel electrophoresis, temperature gradient gel electrophoresis and dideoxy fingerprinting.

[0852] Detection may also optionally be performed with a chip or other such device. The nucleic acid sample which includes the candidate region to be analyzed is preferably isolated, amplified and labeled with a reporter group. This reporter group can be a fluorescent group such as phycoerythrin. The labeled nucleic acid is then incubated with the probes immobilized on the chip using a fluidics station. describe the fabrication of fluidics devices and particularly microcapillary devices, in silicon and glass substrates.

[0853] Once the reaction is completed, the chip is inserted into a scanner and patterns of hybridization are detected. The hybridization data is collected, as a signal emitted from the reporter groups already incorporated into the nucleic acid, which is now bound to the probes attached to the chip. Since the sequence and position of each probe immobilized on the chip is known, the identity of the nucleic acid hybridized to a given probe can be determined.

[0854] It will be appreciated that when utilized along with automated equipment, the above described detection methods can be used to screen multiple samples for a disease and/or pathological condition both rapidly and easily.

Amino Acid Sequences and Peptides

[0855] The terms “polypeptide,” “peptide” and “protein” are used interchangeably herein to refer to a polymer of amino acid residues. The terms apply to amino acid polymers in which one or more amino acid residue is an analog or mimetic of a corresponding naturally occurring amino acid, as well as to naturally occurring amino acid polymers. Polypeptides can be modified, e.g., by the addition of carbohydrate residues to form glycoproteins. The terms “polypeptide,” “peptide” and “protein” include glycoproteins, as well as non-glycoproteins.

[0856] Polypeptide products can be biochemically synthesized such as by employing standard solid phase techniques. Such methods include but are not limited to exclusive solid phase synthesis, partial solid phase synthesis methods, fragment condensation, classical solution synthesis. These methods are preferably used when the peptide is relatively short (i.e., 10 kDa) and/or when it cannot be produced by recombinant techniques (i.e., not encoded by a nucleic acid sequence) and therefore involves different chemistry.

[0857] Solid phase polypeptide synthesis procedures are well known in the art and further described by John Morrow Stewart and Janis Dillaha Young, Solid Phase Peptide Syntheses (2nd Ed., Pierce Chemical Company, 1984).

[0858] Synthetic polypeptides can optionally be purified by preparative high performance liquid chromatography [Creighton T. (1983) Proteins, structures and molecular principles. WH Freeman and Co. N.Y.], after which their composition can be confirmed via amino acid sequencing.

[0859] In cases where large amounts of a polypeptide are desired, it can be generated using recombinant techniques such as described by Bitter et al., (1987) Methods in Enzymol. 153:516-544, Studier et al. (1990) Methods in Enzymol. 185:60-89, Brisson et al. (1984) Nature 310:511-514, Takamatsu et al. (1987) EMBO J. 6:307-311, Coruzzi et al. (1984) EMBO J. 3:1671-1680 and Brogli et al., (1984) Science 224:838-843, Gurley et al. (1986) Mol. Cell. Biol. 6:559-565 and Weissbach & Weissbach, 1988, Methods for Plant Molecular Biology, Academic Press, NY, Section VIII, pp 421-463.

[0860] The present invention also encompasses polypeptides encoded by the polynucleotide sequences of the present invention, as well as polypeptides according to the amino acid sequences described herein. The present invention also encompasses homologues of these polypeptides, such homologues can be at least 50%, at least 55%, at least 60%, at least 65%, at least 70%, at least 75%, at least 80%, at least 85%, at least 95% or more say 100% homologous to the amino acid sequences set forth below, as can be determined using BlastP software of the National Center of Biotechnology Information (NCBI) using default parameters, optionally and preferably including the following: filtering on (this option filters repetitive or low-complexity sequences from the query using the Seg (protein) program), scoring matrix is BLOSUM62 for proteins, word size is 3, E value is 10, gap costs are 11, 1 (initialization and extension), and number of alignments shown is 50. Optionally and preferably, nucleic acid sequence homology/identity may be determined by using BlastN software of the National Center of Biotechnology Information (NCBI) using default parameters, which preferably include using the DUST filter program, and also preferably include having an E value of 10, filtering low complexity sequences and a word size of 11. Finally, the present invention also encompasses fragments of the above described polypeptides and polypeptides having mutations, such as deletions, insertions or substitutions of one or more amino acids, either naturally occurring or artificially induced, either randomly or in a targeted fashion.

[0861] It will be appreciated that peptides identified according the present invention may be degradation products, synthetic peptides or recombinant peptides as well as peptidomimetics, typically, synthetic peptides and peptoids and semipeptoids which are peptide analogs, which may have, for example, modifications rendering the peptides more stable while in a body or more capable of penetrating into cells. Such modifications include, but are not limited to N terminus modification, C terminus modification, peptide bond modification, including, but not limited to, CH2-NH, CH2-S, CH2-S═O, O═C—NH, CH2-O, CH2-CH2, S═C—NH, CH═CH or CF═CH, backbone modifications, and residue modification. Methods for preparing peptidomimetic compounds are well known in the art and are specified. Further details in this respect are provided hereinunder.

[0862] Peptide bonds (—CO—NH—) within the peptide may be substituted, for example, by N-methylated bonds (—N(CH3)-CO—), ester bonds (—C(R)H—C—O—O—C(R)—N—), ketomethylen bonds (—CO—CH2-), α-aza bonds (—NH—N(R)—CO—), wherein R is any alkyl, e.g., methyl, carba bonds (—CH2-NH—), hydroxyethylene bonds (—CH(OH)—CH2-), thioamide bonds (—CS—NH—), olefinic double bonds (—CH═CH—), retro amide bonds (—NH—CO—), peptide derivatives (—N(R)—CH2-CO—), wherein R is the “normal” side chain, naturally presented on the carbon atom.

[0863] These modifications can occur at any of the bonds along the peptide chain and even at several (2-3) at the same time.

[0864] Natural aromatic amino acids, Trp, Tyr and Phe, may be substituted for synthetic non-natural acid such as Phenylglycine, TIC, naphthylelanine (Nol), ring-methylated derivatives of Phe, halogenated derivatives of Phe or o-methyl-Tyr.

[0865] In addition to the above, the peptides of the present invention may also include one or more modified amino acids or one or more non-amino acid monomers (e.g. fatty acids, complex carbohydrates etc).

[0866] As used herein in the specification and in the claims section below the term “amino acid” or “amino acids” is understood to include the 20 naturally occurring amino acids; those amino acids often modified post-translationally in vivo, including, for example, hydroxyproline, phosphoserine and phosphothreonine; and other unusual amino acids including, but not limited to, 2-aminoadipic acid, hydroxylysine, isodesmosine, nor-valine, nor-leucine and ornithine. Furthermore, the term “amino acid” includes both D- and L-amino acids.

[0867] Table 1 non-conventional or modified amino acids which can be used with the present invention.

[0868] Since the peptides of the present invention are preferably utilized in diagnostics which require the peptides to be in soluble form, the peptides of the present invention preferably include one or more non-natural or natural polar amino acids, including but not limited to serine and threonine which are capable of increasing peptide solubility due to their hydroxyl-containing side chain.

[0869] The peptides of the present invention are preferably utilized in a linear form, although it will be appreciated that in cases where cyclicization does not severely interfere with peptide characteristics, cyclic forms of the peptide can also be utilized.

[0870] The peptides of present invention can be biochemically synthesized such as by using standard solid phase techniques. These methods include exclusive solid phase synthesis well known in the art, partial solid phase synthesis methods, fragment condensation, classical solution synthesis. These methods are preferably used when the peptide is relatively short (i.e., 10 kDa) and/or when it cannot be produced by recombinant techniques (i.e., not encoded by a nucleic acid sequence) and therefore involves different chemistry.

[0871] Synthetic peptides can be purified by preparative high performance liquid chromatography and the composition of which can be confirmed via amino acid sequencing.

[0872] In cases where large amounts of the peptides of the present invention are desired, the peptides of the present invention can be generated using recombinant techniques such as described by Bitter et al., (1987) Methods in Enzymol. 153:516-544, Studier et al. (1990) Methods in Enzymol. 185:60-89, Brisson et al. (1984) Nature 310:511-514, Takamatsu et al. (1987) EMBO J. 6:307-311, Coruzzi et al. (1984) EMBO J. 3:1671-1680 and Brogli et al., (1984) Science 224:838-843, Gurley et al. (1986) Mol. Cell. Biol. 6:559-565 and Weissbach & Weissbach, 1988, Methods for Plant Molecular Biology, Academic Press, NY, Section VIII, pp 421-463 and also as described above.

Antibodies

[0873] “Antibody” refers to a polypeptide ligand that is preferably substantially encoded by an immunoglobulin gene or immunoglobulin genes, or fragments thereof, which specifically binds and recognizes an epitope (e.g., an antigen). The recognized immunoglobulin genes include the kappa and lambda light chain constant region genes, the alpha, gamma, delta, epsilon and mu heavy chain constant region genes, and the myriad-immunoglobulin variable region genes. Antibodies exist, e.g., as intact immunoglobulins or as a number of well characterized fragments produced by digestion with various peptidases. This includes, e.g., Fab′ and F(ab)′₂ fragments. The term “antibody,” as used herein, also includes antibody fragments either produced by the modification of whole antibodies or those synthesized de novo using recombinant DNA methodologies. It also includes polyclonal antibodies, monoclonal antibodies, chimeric antibodies, humanized antibodies, or single chain antibodies. “Fc” portion of an antibody refers to that portion of an immunoglobulin heavy chain that comprises one or more heavy chain constant region domains, CH1, CH2 and CH3, but does not include the heavy chain variable region.

[0874] The functional fragments of antibodies, such as Fab, F(ab′)₂, and Fv that are capable of binding to macrophages, are described as follows: (1) Fab, the fragment which contains a monovalent antigen-binding fragment of an antibody molecule, can be produced by digestion of whole antibody with the enzyme papain to yield an intact light chain and a portion of one heavy chain; (2) Fab′, the fragment of an antibody molecule that can be obtained by treating whole antibody with pepsin, followed by reduction, to yield an intact light chain and a portion of the heavy chain; two Fab′ fragments are obtained per antibody molecule; (3) (Fab′)2, the fragment of the antibody that can be obtained by treating whole antibody with the enzyme pepsin without subsequent reduction; F(ab′)2 is a dimer of two Fab′ fragments held together by two disulfide bonds; (4) Fv, defined as a genetically engineered fragment containing the variable region of the light chain and the variable region of the heavy chain expressed as two chains; and (5) Single chain antibody (“SCA”), a genetically engineered molecule containing the variable region of the light chain and the variable region of the heavy chain, linked by a suitable polypeptide linker as a genetically fused single chain molecule.

[0875] Methods of producing polyclonal and monoclonal antibodies as well as fragments thereof are well known in the art (See for example, Harlow and Lane, Antibodies: A Laboratory Manual, Cold Spring Harbor Laboratory, New York, 1988, incorporated herein by reference).

[0876] Antibody fragments according to the present invention can be prepared by proteolytic hydrolysis of the antibody or by expression in E. coli or mammalian cells (e.g. Chinese hamster ovary cell culture or other protein expression systems) of DNA encoding the fragment. Antibody fragments can be obtained by pepsin or papain digestion of whole antibodies by conventional methods. For example, antibody fragments can be produced by enzymatic cleavage of antibodies with pepsin to provide a 5S fragment denoted F(ab′)2. This fragment can be further cleaved using a thiol reducing agent, and optionally a blocking group for the sulfhydryl groups resulting from cleavage of disulfide linkages, to produce 3.5S Fab′ monovalent fragments. Alternatively, an enzymatic cleavage using pepsin produces two monovalent Fab′ fragments and an Fc fragment directly. These methods are described, for example, by Goldenberg, U.S. Pat. Nos. 4,036,945 and 4,331,647, and references contained therein, which patents are hereby incorporated by reference in their entirety. See also Porter, R. R. [Biochem. J. 73: 119-126 (1959)]. Other methods of cleaving antibodies, such as separation of heavy chains to form monovalent light-heavy chain fragments, further cleavage of fragments, or other enzymatic, chemical, or genetic techniques may also be used, so long as the fragments bind to the antigen that is recognized by the intact antibody.

[0877] Fv fragments comprise an association of VH and VL chains. This association may be noncovalent, as described in Inbar et al. [Proc. Nat'l Acad. Sci. USA 69:2659-62 (19720]. Alternatively, the variable chains can be linked by an intermolecular disulfide bond or cross-linked by chemicals such as glutaraldehyde. Preferably, the Fv fragments comprise VH and VL chains connected by a peptide linker. These single-chain antigen binding proteins (sFv) are prepared by constructing a structural gene comprising DNA sequences encoding the VH and VL domains connected by an oligonucleotide. The structural gene is inserted into an expression vector, which is subsequently introduced into a host cell such as E. coli. The recombinant host cells synthesize a single polypeptide chain with a linker peptide bridging the two V domains. Methods for producing sFvs are described, for example, by [Whitlow and Filpula, Methods 2: 97-105 (1991); Bird et al., Science 242:423-426 (1988); Pack et al., Bio/Technology 11:1271-77 (1993); and U.S. Pat. No. 4,946,778, which is hereby incorporated by reference in its entirety.

[0878] Another form of an antibody fragment is a peptide coding for a single complementarity-determining region (CDR). CDR peptides (“minimal recognition units”) can be obtained by constructing genes encoding the CDR of an antibody of interest. Such genes are prepared, for example, by using the polymerase chain reaction to synthesize the variable region from RNA of antibody-producing cells. See, for example, Larrick and Fry [Methods, 2: 106-10 (1991)].

[0879] Humanized forms of non-human (e.g., murine) antibodies are chimeric molecules of immunoglobulins, immunoglobulin chains or fragments thereof (such as Fv, Fab, Fab′, F(ab′) or other antigen-binding subsequences of antibodies) which contain minimal sequence derived from non-human immunoglobulin. Humanized antibodies include human immunoglobulins (recipient antibody) in which residues from a complementary determining region (CDR) of the recipient are replaced by residues from a CDR of a non-human species (donor antibody) such as mouse, rat or rabbit having the desired specificity, affinity and capacity. In some instances, Fv framework residues of the human immunoglobulin are replaced by corresponding non-human residues. Humanized antibodies may also comprise residues which are found neither in the recipient antibody nor in the imported CDR or framework sequences. In general, the humanized antibody will comprise substantially all of at least one, and typically two, variable domains, in which all or substantially all of the CDR regions correspond to those of a non-human immunoglobulin and all or substantially all of the FR regions are those of a human immunoglobulin consensus sequence. The humanized antibody optimally also will comprise at least a portion of an immunoglobulin constant region (Fc), typically that of a human immunoglobulin [Jones et al., Nature, 321:522-525 (1986); Riechmann et al., Nature, 332:323-329 (1988); and Presta, Curr. Op. Struct. Biol., 2:593-596 (1992)].

[0880] Methods for humanizing non-human antibodies are well known in the art. Generally, a humanized antibody has one or more amino acid residues introduced into it from a source which is non-human. These non-human amino acid residues are often referred to as import residues, which are typically taken from an import variable domain. Humanization can be essentially performed following the method of Winter and co-workers [Jones et al., Nature, 321:522-525 (1986); Riechmann et al., Nature 332:323-327 (1988); Verhoeyen et al., Science, 239:1534-1536 (1988)], by substituting rodent CDRs or CDR sequences for the corresponding sequences of a human antibody. Accordingly, such humanized antibodies are chimeric antibodies (U.S. Pat. No. 4,816,567), wherein substantially less than an intact human variable domain has been substituted by the corresponding sequence from a non-human species. In practice, humanized antibodies are typically human antibodies in which some CDR residues and possibly some FR residues are substituted by residues from analogous sites in rodent antibodies.

[0881] Human antibodies can also be produced using various techniques known in the art, including phage display libraries [Hoogenboom and Winter, J. Mol. Biol., 227:381 (1991); Marks et al., J. Mol. Biol., 222:581 (1991)]. The techniques of Cole et al. and Boerner et al. are also available for the preparation of human monoclonal antibodies (Cole et al., Monoclonal Antibodies and Cancer Therapy, Alan R. Liss, p. 77 (1985) and Boerner et al., J. Immunol., 147(1):86-95 (1991)]. Similarly, human antibodies can be made by introduction of human immunoglobulin loci into transgenic animals, e.g., mice in which the endogenous immunoglobulin genes have been partially or completely inactivated. Upon challenge, human antibody production is observed, which closely resembles that seen in humans in all respects, including gene rearrangement, assembly, and antibody repertoire. This approach is described, for example, in U.S. Pat. Nos. 5,545,807; 5,545,806; 5,569,825; 5,625,126; 5,633,425; 5,661,016, and in the following scientific publications: Marks et al., Bio/Technology 10,: 779-783 (1992); Lonberg et al., Nature 368: 856-859 (1994); Morrison, Nature 368 812-13 (1994); Fishwild et al., Nature Biotechnology 14, 845-51 (1996); Neuberger, Nature Biotechnology 14: 826 (1996); and Lonberg and Huszar, Intern. Rev. Immunol. 13, 65-93 (1995).

[0882] Preferably, the antibody of this aspect of the present invention specifically binds at least one epitope of the polypeptide variants of the present invention. As used herein, the term “epitope” refers to any antigenic determinant on an antigen to which the paratope of an antibody binds.

[0883] Epitopic determinants usually consist of chemically active surface groupings of molecules such as amino acids or carbohydrate side chains and usually have specific three dimensional structural characteristics, as well as specific charge characteristics.

[0884] Optionally, a unique epitope may be created in a variant due to a change in one or more post-translational modifications, including but not limited to glycosylation and/or phosphorylation, as described below. Such a change may also cause a new epitope to be created, for example through removal of glycosylation at a particular site.

[0885] An epitope according to the present invention may also optionally comprise part or all of a unique sequence portion of a variant according to the present invention in combination with at least one other portion of the variant which is not contiguous to the unique sequence portion in the linear polypeptide itself, yet which are able to form an epitope in combination. One or more unique sequence portions may optionally combine with one or more other non-contiguous portions of the variant (including a portion which may have high homology to a portion of the known protein) to form an epitope.

Immunoassays

[0886] In another embodiment of the present invention, an immunoassay can be used to qualitatively or quantitatively detect and analyze markers in a sample. This method comprises: providing an antibody that specifically binds to a marker; contacting a sample with the antibody; and detecting the presence of a complex of the antibody bound to the marker in the sample.

[0887] To prepare an antibody that specifically binds to a marker, purified protein markers can be used. Antibodies that specifically bind to a protein marker can be prepared using any suitable methods known in the art.

[0888] After the antibody is provided, a marker can be detected and/or quantified using any of a number of well recognized immunological binding assays. Useful assays include, for example, an enzyme immune assay (EIA) such as enzyme-linked immunosorbent assay (ELISA), a radioimmune assay (RIA), a Western blot assay, or a slot blot assay see, e.g., U.S. Pat. Nos. 4,366,241; 4,376,110; 4,517,288; and 4,837,168). Generally, a sample obtained from a subject can be contacted with the antibody that specifically binds the marker.

[0889] Optionally, the antibody can be fixed to a solid support to facilitate washing and subsequent isolation of the complex, prior to contacting the antibody with a sample. Examples of solid supports include but are not limited to glass or plastic in the form of, e.g., a microtiter plate, a stick, a bead, or a microbead. Antibodies can also be attached to a solid support.

[0890] After incubating the sample with antibodies, the mixture is washed and the antibody-marker complex formed can be detected. This can be accomplished by incubating the washed mixture with a detection reagent. Alternatively, the marker in the sample can be detected using an indirect assay, wherein, for example, a second, labeled antibody is used to detect bound marker-specific antibody, and/or in a competition or inhibition assay wherein, for example, a monoclonal antibody which binds to a distinct epitope of the marker are incubated simultaneously with the mixture.

[0891] Throughout the assays, incubation and/or washing steps may be required after each combination of reagents. Incubation steps can vary from about 5 seconds to several hours, preferably from about 5 minutes to about 24 hours. However, the incubation time will depend upon the assay format, marker, volume of solution, concentrations and the like. Usually the assays will be carried out at ambient temperature, although they can be conducted over a range of temperatures, such as 10° C. to 40° C.

[0892] The immunoassay can be used to determine a test amount of a marker in a sample from a subject. First, a test amount of a marker in a sample can be detected using the immunoassay methods described above. If a marker is present in the sample, it will form an antibody-marker complex with an antibody that specifically binds the marker under suitable incubation conditions described above. The amount of an antibody-marker complex can optionally be determined by comparing to a standard. As noted above, the test amount of marker need not be measured in absolute units, as long as the unit of measurement can be compared to a control amount and/or signal.

[0893] Preferably used are antibodies which specifically interact with the polypeptides of the present invention and not with wild type proteins or other isoforms thereof, for example. Such antibodies are directed, for example, to the unique sequence portions of the polypeptide variants of the present invention, including but not limited to bridges, heads, tails and insertions described in greater detail below. Preferred embodiments of antibodies according to the present invention are described in greater detail with regard to the section entitled “Antibodies”.

[0894] Radio-immunoassay (RIA): In one version, this method involves precipitation of the desired substrate and in the methods detailed hereinbelow, with a specific antibody and radiolabelled antibody binding protein (e.g., protein A labeled with I¹²⁵) immobilized on a precipitable carrier such as agarose beads. The number of counts in the precipitated pellet is proportional to the amount of substrate.

[0895] In an alternate version of the RIA, a labeled substrate and an unlabelled antibody binding protein are employed. A sample containing an unknown amount of substrate is added in varying amounts. The decrease in precipitated counts from the labeled substrate is proportional to the amount of substrate in the added sample.

[0896] Enzyme linked immunosorbent assay (ELISA): This method involves fixation of a sample (e.g., fixed cells or a proteinaceous solution) containing a protein substrate to a surface such as a well of a microtiter plate. A substrate specific antibody coupled to an enzyme is applied and allowed to bind to the substrate. Presence of the antibody is then detected and quantitated by a colorimetric reaction employing the enzyme coupled to the antibody. Enzymes commonly employed in this method include horseradish peroxidase and alkaline phosphatase. If well calibrated and within the linear range of response, the amount of substrate present in the sample is proportional to the amount of color produced. A substrate standard is generally employed to improve quantitative accuracy.

[0897] Western blot: This method involves separation of a substrate from other protein by means of an acrylamide gel followed by transfer of the substrate to a membrane (e.g., nylon or PVDF). Presence of the substrate is then detected by antibodies specific to the substrate, which are in turn detected by antibody binding reagents. Antibody binding reagents may be, for example, protein A, or other antibodies. Antibody binding reagents may be radiolabelled or enzyme linked as described hereinabove. Detection may be by autoradiography, calorimetric reaction or chemiluminescence. This method allows both quantitation of an amount of substrate and determination of its identity by a relative position on the membrane which is indicative of a migration distance in the acrylamide gel during electrophoresis.

[0898] Immunohistochemical analysis: This method involves detection of a substrate in situ in fixed cells by substrate specific antibodies. The substrate specific antibodies may be enzyme linked or linked to fluorophores. Detection is by microscopy and subjective evaluation. If enzyme linked antibodies are employed, a calorimetric reaction may be required.

[0899] Fluorescence activated cell sorting (FACS): This method involves detection of a substrate in situ in cells by substrate specific antibodies. The substrate specific antibodies are linked to fluorophores. Detection is by means of a cell sorting machine which reads the wavelength of light emitted from each cell as it passes through a light beam. This method may employ two or more antibodies simultaneously.

Radio-Imaging Methods

[0900] These methods include but are not limited to, positron emission tomography (PET) single photon emission computed tomography (SPECT). Both of these techniques are non-invasive, and can be used to detect and/or measure a wide variety of tissue events and/or functions, such as detecting cancerous cells for example. Unlike PET, SPECT can optionally be used with two labels simultaneously. SPECT has some other advantages as well, for example with regard to cost and the types of labels that can be used. For example, U.S. Pat. No. 6,696,686 describes the use of SPECT for detection of breast cancer, and is hereby incorporated by reference as if fully set forth herein.

Display Libraries

[0901] According to still another aspect of the present invention there is provided a display library comprising a plurality of display vehicles (such as phages, viruses or bacteria) each displaying at least 6, at least 7, at least 8, at least 9, at least 10, 10-15, 12-17, 15-20, 15-30 or 20-50 consecutive amino acids derived from the polypeptide sequences of the present invention.

[0902] Methods of constructing such display libraries are well known in the art. Such methods are described in, for example, Young A C, et al., “The three-dimensional structures of a polysaccharide binding antibody to Cryptococcus neoformans and its complex with a peptide from a phage display library: implications for the identification of peptide mimotopes” J Mol Biol 1997 Dec. 12;274(4):622-34; Giebel L B et al. “Screening of cyclic peptide phage libraries identifies ligands that bind streptavidin with high affinities” Biochemistry 1995 Nov. 28;34(47):15430-5; Davies E L et al., “Selection of specific phage-display antibodies using libraries derived from chicken immunoglobulin genes” J Immunol Methods 1995 Oct. 12;186(1):125-35; Jones C R T al. “Current trends in molecular recognition and bioseparation” J Chromatogr A 1995 Jul. 14;707(1):3-22; Deng S J et al. “Basis for selection of improved carbohydrate-binding single-chain antibodies from synthetic gene libraries” Proc Natl Acad Sci USA 1995 May 23;92(11):4992-6; and Deng S J et al. “Selection of antibody single-chain variable fragments with improved carbohydrate binding by phage display” J Biol Chem 1994 Apr. 1;269(13):9533-8, which are incorporated herein by reference.

[0903] The following sections relate to Candidate Marker Examples (first section) and to Experimental Data for these Marker Examples (second section).

[0904] It should be noted that Table numbering is restarted within each section.

Candidate Marker Examples Section

[0905] This Section relates to Examples of sequences according to the present invention, including illustrative methods of selection thereof.

[0906] Description of the Methodology Undertaken to Uncover the Biomolecular Sequences of the Present Invention

[0907] Human ESTs and cDNAs were obtained from GenBank versions 136 (Jun. 15, 2003 ftp.ncbi.nih.gov/genbank/release.notes/gb136.release.notes); NCBI genome assembly of April 2003; RefSeq sequences from June 2003; Genbank version 139 (December 2003); Human Genome from NCBI (Build 34) (from October 2003); and RefSeq sequences from December 2003; and from the LifeSeq library of Incyte Corporation (Wilmington, Del., USA; ESTs only). With regard to GenBank sequences, the human EST sequences from the EST (GBEST) section and the human mRNA sequences from the primate (GBPRI) section were used; also the human nucleotide RefSeq mRNA sequences were used (see for example www.ncbi.nlm.nih.gov/Genbank/GenbankOverview.html and for a reference to the EST section, see www.ncbi.nlm.nih.gov/dbEST/; a general reference to dbEST, the EST database in GenBank, may be found in Boguski et al, Nat Genet. 1993 August; 4(4):332-3; all of which are hereby incorporated by reference as if fully set forth herein).

[0908] Novel splice variants were predicted using the LEADS clustering and assembly system as described in Sorek, R., Ast, G. & Graur, D. Alu-containing exons are alternatively spliced. Genome Res 12, 1060-7 (2002); U.S. Pat. No. 6,625,545; and U.S. patent application Ser. No. 10/426,002, published as US20040101876 on May 27, 2004; all of which are hereby incorporated by reference as if fully set forth herein. Briefly, the software cleans the expressed sequences from repeats, vectors and immunoglobulins. It then aligns the expressed sequences to the genome taking alternatively splicing into account and clusters overlapping expressed sequences into “clusters” that represent genes or partial genes.

[0909] These were annotated using the GeneCarta (Compugen, Tel-Aviv, Israel) platform. The GeneCarta platform includes a rich pool of annotations, sequence information (particularly of spliced sequences), chromosomal information, alignments, and additional information such as SNPs, gene ontology terms, expression profiles, functional analyses, detailed domain structures, known and predicted proteins and detailed homology reports.

[0910] A brief explanation is provided with regard to the method of selecting the candidates. However, it should noted that this explanation is provided for descriptive purposes only, and is not intended to be limiting in any way. The potential markers were identified by a computational process that was designed to find genes and/or their splice variants that are over-expressed in tumor tissues, by using databases of expressed sequences. Various parameters related to the information in the EST libraries, determined according to a manual classification process, were used to assist in locating genes and/or splice variants thereof that are over-expressed in cancerous tissues. The detailed description of the selection method is presented in Example 1 below. The cancer biomarkers selection engine and the following wet validation stages are schematically summarized in FIG. 1.

### EXAMPLE 1

Identification of Differentially Expressed Gene Products—Algorithm

[0911] In order to distinguish between differentially expressed gene products and constitutively expressed genes (i.e., house keeping genes) an algorithm based on an analysis of frequencies was configured. A specific algorithm for identification of transcripts over expressed in cancer is described hereinbelow.

[0912] Dry Analysis

[0913] Library annotation—EST libraries are manually classified according to:

[0914] (i) Tissue origin

[0915] (ii) Biological source—Examples of frequently used biological sources for construction of EST libraries include cancer cell-lines; normal tissues; cancer tissues; fetal tissues; and others such as normal cell lines and pools of normal cell-lines, cancer cell-lines and combinations thereof. A specific description of abbreviations used below with regard to these tissues/cell lines etc is given above.

[0916] (iii) Protocol of library construction—various methods are known in the art for library construction including normalized library construction; non-normalized library construction; subtracted libraries; ORESTES and others. It will be appreciated that at times the protocol of library construction is not indicated.

[0917] The following rules are followed:

[0918] EST libraries originating from identical biological samples are considered as a single library.

[0919] EST libraries which included above-average levels of contamination, such as DNA contamination for example, were eliminated. The presence of such contamination was determined as follows. For each library, the number of unspliced ESTs that are not fully contained within other spliced sequences was counted. If the percentage of such sequences (as compared to all other sequences) was at least 4 standard deviations above the average for all libraries being analyzed, this library was tagged as being contaminated and was eliminated from further consideration in the below analysis (see also Sorek, R. & Safer, H. M. A novel algorithm for computational identification of contaminated EST libraries. Nucleic Acids Res 31, 1067-74 (2003) for further details).

[0920] Clusters (genes) having at least five sequences including at least two sequences from the tissue of interest were analyzed. Splice variants were identified by using the LEADS software package as described above.

### EXAMPLE 2

Identification of Genes Over Expressed in Cancer.

Two different scoring algorithms were developed.

[0921] Libraries score—candidate sequences which are supported by a number of cancer libraries, are more likely to serve as specific and effective diagnostic markers.

[0922] The basic algorithm—for each cluster the number of cancer and normal libraries contributing sequences to the cluster was counted. Fisher exact test was used to check if cancer libraries are significantly over-represented in the cluster as compared to the total number of cancer and normal libraries.

[0923] Library counting: Small libraries (e.g., less than 1000 sequences) were excluded from consideration unless they participate in the cluster. For this reason, the total number of libraries is actually adjusted for each cluster.

[0924] Clones no. score—Generally, when the number of ESTs is much higher in the cancer libraries relative to the normal libraries it might indicate actual over-expression.

[0925] The Algorithm—

[0926] Clone counting: For counting EST clones each library protocol class was given a weight based on our belief of how much the protocol reflects actual expression levels:

[0927] (i) non-normalized: 1

[0928] (ii) normalized: 0.2

[0929] (iii) all other classes: 0.1

[0930] Clones number score—The total weighted number of EST clones from cancer libraries was compared to the EST clones from normal libraries. To avoid cases where one library contributes to the majority of the score, the contribution of the library that gives most clones for a given cluster was limited to 2 clones.

[0931] The score was computed as

[0932] where:

[0933] c—weighted number of “cancer” clones in the cluster.

[0934] C— weighted number of clones in all “cancer” libraries.

[0935] n—weighted number of “normal” clones in the cluster.

[0936] N— weighted number of clones in all “normal” libraries.

[0937] Clones number score significance—Fisher exact test was used to check if EST clones from cancer libraries are significantly over-represented in the cluster as compared to the total number of EST clones from cancer and normal libraries.

[0938] Two search approaches were used to find either general cancer-specific candidates or tumor specific candidates.
[0939] Libraries/sequences originating from tumor tissues are counted as well as libraries originating from cancer cell-lines (“normal” cell-lines were ignored).
[0940] Only libraries/sequences originating from tumor tissues are counted

### EXAMPLE 3

Identification of Tissue Specific Genes

[0941] For detection of tissue specific clusters, tissue libraries/sequences were compared to the total number of libraries/sequences in cluster. Similar statistical tools to those described in above were employed to identify tissue specific genes. Tissue abbreviations are the same as for cancerous tissues, but are indicated with the header “normal tissue”.

[0942] The algorithm—for each tested tissue T and for each tested cluster the following were examined:

[0943] 1. Each cluster includes at least 2 libraries from the tissue T. At least 3 clones (weighed—as described above) from tissue T in the cluster; and

[0944] 2. Clones from the tissue T are at least 40% from all the clones participating in the tested cluster

[0945] Fisher exact test P-values were computed both for library and weighted clone counts to check that the counts are statistically significant.

### EXAMPLE 4

Identification of Splice Variants Over Expressed in Cancer of Clusters Which are Not Over Expressed in Cancer

[0946] Cancer-Specific Splice Variants Containing a Unique Region were Identified.

[0947] Identification of Unique Sequence Regions in Splice Variants

[0948] A Region is defined as a group of adjacent exons that always appear or do not appear together in each splice variant.

[0949] A “segment” (sometimes referred also as “seg” or “node”) is defined as the shortest contiguous transcribed region without known splicing inside.

[0950] Only reliable ESTs were considered for region and segment analysis. An EST was defined as unreliable if:

[0951] (i) Unspliced;

[0952] (ii) Not covered by RNA;

[0953] (iii) Not covered by spliced ESTs; and

[0954] (iv) Alignment to the genome ends in proximity of long poly-A stretch or starts in proximity of long poly-T stretch.

[0955] Only reliable regions were selected for further scoring. Unique sequence regions were considered reliable if:

[0956] (i) Aligned to the genome; and

[0957] (ii) Regions supported by more than 2 ESTs.

[0958] The Algorithm

[0959] Each unique sequence region divides the set of transcripts into 2 groups:

[0960] (i) Transcripts containing this region (group TA).

[0961] (ii) Transcripts not containing this region (group TB).

[0962] The set of EST clones of every cluster is divided into 3 groups:

[0963] (i) Supporting (originating from) transcripts of group TA (S 1).

[0964] (ii) Supporting transcripts of group TB (S2).

[0965] (iii) Supporting transcripts from both groups (S3).

[0966] Library and clones number scores described above were given to S1 group.

[0967] Fisher Exact Test P-values were used to check if:

[0968] S1 is significantly enriched by cancer EST clones compared to S2; and

[0969] S1 is significantly enriched by cancer EST clones compared to cluster background (S1+S2+S3).

[0970] Identification of unique sequence regions and division of the group of transcripts accordingly is illustrated in FIG. 2. Each of these unique sequence regions corresponds to a segment, also termed herein a “node”.

[0971] Region 1: common to all transcripts, thus it is not considered; Region 2: specific to Transcript 1: T_{—}1 unique regions (2+6) against T_{—}2+3 unique regions (3+4); Region 3: specific to Transcripts 2+3: T_{—}2+3 unique regions (3+4) against T1 unique regions (2+6); Region 4: specific to Transcript 3: T_{—}3 unique regions (4) against T1+2 unique regions (2+5+6); Region 5: specific to Transcript 1+2: T_{—}1+2 unique regions (2+5+6) against T3 unique regions (4); Region 6: specific to Transcript 1: same as region 2.

### EXAMPLE 5

[0972] Identification of Cancer Specific Splice Variants of Genes Over Expressed in Cancer

[0973] A search for EST supported (no mRNA) regions for genes of:

[0974] (i) known cancer markers

[0975] (ii) Genes shown to be over-expressed in cancer in published micro-array experiments.

[0976] Reliable EST supported-regions were defined as supported by minimum of one of the following:

[0977] (i) 3 spliced ESTs; or

[0978] (ii) 2 spliced ESTs from 2 libraries;

[0979] (iii) 10 unspliced ESTs from 2 libraries, or

[0980] (iv) 3 libraries.

Actual Marker Examples

[0981] The following examples relate to specific actual marker examples.

Experimental Examples Section

[0982] This Section relates to Examples describing experiments involving these sequences, and illustrative, non-limiting examples of methods, assays and uses thereof. The materials and experimental procedures are explained first, as all experiments used them as a basis for the work that was performed.

[0983] The markers of the present invention were tested with regard to their expression in various cancerous and non-cancerous tissue samples. A description of the samples used in the panel is provided in Table 1 below. A description of the samples used in the normal tissue panel is provided in Table 2 below. Tests were then performed as described in the “Materials and Experimental Procedures” section below.

Materials and Experimental Procedures

[0984] RNA preparation—RNA was obtained from Clontech (Franklin Lakes, N.J. USA 07417, www.clontech.com), BioChain Inst. Inc. (Hayward, Calif. 94545 USA www.biochain.com), ABS (Wilmington, Del. 19801, USA, http://www.absbioreagents.com) or Ambion (Austin, Tex. 78744 USA, http://www.ambion.com). Alternatively, RNA was generated from tissue samples using TRI-Reagent (Molecular Research Center), according to Manufacturer's instructions. Tissue and RNA samples were obtained from patients or from postmortem. Total RNA samples were treated with DNaseI (Ambion) and purified using RNeasy columns (Qiagen).

[0985] RT PCR—Purified RNA (1 μg) was mixed with 150 ng Random Hexamer primers (Invitrogen) and 500 μM dNTP in a total volume of 15.6 μl. The mixture was incubated for 5 min at 65° C. and then quickly chilled on ice. Thereafter, 5 μl of 5× SuperscriptII first strand buffer (Invitrogen), 2.4 μl 0.1M DTT and 40 units RNasin (Promega) were added, and the mixture was incubated for 10 min at 25° C., followed by further incubation at 42° C. for 2 min. Then, 1 μl (200 units) of SuperscriptII (Invitrogen) was added and the reaction (final volume of 25 μl) was incubated for 50 min at 42° C. and then inactivated at 70° C. for 15 min. The resulting cDNA was diluted 1:20 in TE buffer (10 mM Tris pH=8, 1 mM EDTA pH=8).

[0986] Real-Time RT-PCR analysis—cDNA (511), prepared as described above, was used as a template in Real-Time PCR reactions using the SYBR Green I assay (PE Applied Biosystem) with specific primers and UNG Enzyme (Eurogentech or ABI or Roche). The amplification was effected as follows: 50° C. for 2 min, 95° C. for 10 min, and then 40 cycles of 95° C. for 15 sec, followed by 60° C. for 1 min. Detection was performed by using the PE Applied Biosystem SDS 7000. The cycle in which the reactions achieved a threshold level (Ct) of fluorescence was registered and was used to calculate the relative transcript quantity in the RT reactions. The relative quantity was calculated using the equation Q=efficiencyˆ^{-Ct}. The efficiency of the PCR reaction was calculated from a standard curve, created by using serial dilutions of several reverse transcription (RT) reactions. To minimize inherent differences in the RT reaction, the resulting relative quantities were normalized to the geometric mean of the relative quantities of several housekeeping (HSKP) genes. Schematic summary of quantitative real-time PCR analysis is presented in FIG. 3. As shown, the x-axis shows the cycle number. The C_{T}=Threshold Cycle point, which is the cycle that the amplification curve crosses the fluorescence threshold that was set in the experiment. This point is a calculated cycle number in which PCR products signal is above the background level (passive dye ROX) and still in the Geometric/Exponential phase (as shown, once the level of fluorescence crosses the measurement threshold, it has a geometrically increasing phase, during which measurements are most accurate, followed by a linear phase and a plateau phase; for quantitative measurements, the latter two phases do not provide accurate measurements). The y-axis shows the normalized reporter fluorescence. It should be noted that this type of analysis provides relative quantification.

[0987] The sequences of the housekeeping genes measured in all the examples on tissue testing panel were as follows:

[0988] The sequences of the housekeeping genes measured in all the examples on normal tissue panel were as follows:

[0989] Oligonucleotide-Based Micro-Array Experiment Protocol—

Microarray Fabrication

[0990] Microarrays (chips) were printed by pin deposition using the MicroGrid II MGII 600 robot from BioRobtics Limited (Cambridge, UK). 50-mer oligonucleotides target sequences were designed by Compugen Ltd (Tel-Aviv, IL) as described by A. Shoshan et al, “Optical technologies and informatics”, Proceedings of SPIE. Vol 4266, pp. 86-95 (2001). The designed oligonucleotides were synthesized and purified by desalting with the Sigma-Genosys system (The Woodlands, Tex., US) and all of the oligonucleotides were joined to a C6 amino-modified linker at the 5′ end, or being attached directly to CodeLink slides (Cat #25-6700-01. Amersham Bioscience, Piscataway, N.J., US). The 50-mer oligonucleotides, forming the target sequences, were first suspended in Ultra-pure DDW (Cat # 01-866-1A Kibbutz Beit-Haemek, Israel) to a concentration of 50 μM. Before printing the slides, the oligonucleotides were resuspended in 300 mM sodium phosphate (pH 8.5) to final concentration of 150 mM and printed at 35-40% relative humidity at 21° C.

[0991] Each slide contained a total of 9792 features in 32 subarrays. Of these features, 4224 features were sequences of interest according to the present invention and negative controls that were printed in duplicate. An additional 288 features (96 target sequences printed in triplicate) contained housekeeping genes from Human Evaluation Library2, Compugen Ltd, Israel. Another 384 features are E. coli spikes 1-6, which are oligos to E-Coli genes which are commercially available in the Array Control product (Array control-sense oligo spots, Ambion Inc. Austin, Tex. Cat # 1781, Lot #112K06).

Post-Coupling Processing of Printed Slides

[0992] After the spotting of the oligonucleotides to the glass (CodeLink) slides, the slides were incubated for 24 hours in a sealed saturated NaCl humidification chamber (relative humidity 70-75%).

[0993] Slides were treated for blocking of the residual reactive groups by incubating them in blocking solution at 50° C. for 15 minutes (10 ml/slide of buffer containing 0.1M Tris, 50 mM ethanolamine, 0.1% SDS). The slides were then rinsed twice with Ultra-pure DDW (double distilled water). The slides were then washed with wash solution (10 ml/slide. 4×SSC, 0.1% SDS)) at 50° C. for 30 minutes on the shaker. The slides were then rinsed twice with Ultra-pure DDW, followed by drying by centrifugation for 3 minutes at 800 rpm.

[0994] Next, in order to assist in automatic operation of the hybridization protocol, the slides were treated with Ventana Discovery hybridization station barcode adhesives. The printed slides were loaded on a Bio-Optica (Milan, Italy) hematology staining device and were incubated for 10 minutes in 50 ml of 3-Aminopropyl Triethoxysilane (Sigma A3648 lot #122K589). Excess fluid was dried and slides were then incubated for three hours in 20 mm/Hg in a dark vacuum desiccator (Pelco 2251, Ted Pella, Inc. Redding Calif.).

[0995] The following protocol was then followed with the Genisphere 900-RP (random primer), with mini elute columns on the Ventana Discovery HybStation™, to perform the microarray experiments. Briefly, the protocol was performed as described with regard to the instructions and information provided with the device itself. The protocol included cDNA synthesis and labeling. cDNA concentration was measured with the TBS-380 (Turner Biosystems. Sunnyvale, Calif.) PicoFlour, which is used with the OliGreen ssDNA Quantitation reagent and kit.

[0996] Hybridization was performed with the Ventana Hybridization device, according to the provided protocols (Discovery Hybridization Station Tuscon Ariz.).

[0997] The slides were then scanned with GenePix 4000B dual laser scanner from Axon Instruments Inc, and analyzed by GenePix Pro 5.0 software.

[0998] Schematic summary of the oligonucleotide based microarray fabrication and the experimental flow is presented in FIGS. 4 and 5.

[0999] Briefly, as shown in FIG. 4, DNA oligonucleotides at 25 uM were deposited (printed) onto Amersham ‘CodeLink’ glass slides generating a well defined ‘spot’. These slides are covered with a long-chain, hydrophilic polymer chemistry that creates an active 3-D surface that covalently binds the DNA oligonucleotides 5′-end via the C6-amine modification. This binding ensures that the full length of the DNA oligonucleotides is available for hybridization to the cDNA and also allows lower background, high sensitivity and reproducibility.

[1000] FIG. 5 shows a schematic method for performing the microarray experiments. It should be noted that stages on the left-hand or right-hand side may optionally be performed in any order, including in parallel, until stage 4 (hybridization). Briefly, on the left-hand side, the target oligonucleotides are being spotted on a glass microscope slide (although optionally other materials could be used) to form a spotted slide (stage 1). On the right hand side, control sample RNA and cancer sample RNA are Cy3 and Cy5 labeled, respectively (stage 2), to form labeled probes. It should be noted that the control and cancer samples come from corresponding tissues (for example, normal prostate tissue and cancerous prostate tissue). Furthermore, the tissue from which the RNA was taken is indicated below in the specific examples of data for particular clusters, with regard to overexpression of an oligonucleotide from a “chip” (microarray), as for example “prostate” for chips in which prostate cancerous tissue and normal tissue were tested as

[1001] described above. In stage 3, the probes are mixed. In stage 4, hybridization is performed to form a processed slide. In stage 5, the slide is washed and scanned to form an image file, followed by data analysis in stage 6.

Description for Cluster M85491

[1002] Cluster M85491 features 2 transcript(s) and 11 segment(s) of interest, the names for which are given in Tables 1 and 2, respectively, the sequences themselves are given at the end of the application. The selected protein variants are given in table 3.

[1003] These sequences are variants of the known protein Ephrin type-B receptor 2 [precursor] (SwissProt accession identifier EPB2_HUMAN; known also according to the synonyms EC 2.7.1.112; Tyrosine-protein kinase receptor EPH-3; DRT; Receptor protein-tyrosine kinase HEK5; ERK), SEQ ID NO: 616, referred to herein as the previously known protein.

[1004] Protein Ephrin type-B receptor 2 [precursor] is known or believed to have the following function(s): Receptor for members of the ephrin-B family. The sequence for protein Ephrin type-B receptor 2 [precursor] is given at the end of the application, as “Ephrin type-B receptor 2 [precursor] amino acid sequence” (SEQ ID NO:616). Known polymorphisms for this sequence are as shown in Table 4.

[1005] Protein Ephrin type-B receptor 2 [precursor] (SEQ ID NO:616) localization is believed to be Type I membrane protein.

[1006] The following GO Annotation(s) apply to the previously known protein. The following annotation(s) were found: protein amino acid phosphorylation; transmembrane receptor protein tyrosine kinase signaling pathway; neurogenesis, which are annotation(s) related to Biological Process; protein tyrosine kinase; receptor; transmembrane-ephrin receptor; ATP binding; transferase, which are annotation(s) related to Molecular Function; and integral membrane protein, which are annotation(s) related to Cellular Component.

[1007] The GO assignment relies on information from one or more of the SwissProt/TremB1 Protein knowledgebase, available from <http://www.expasy.ch/sprot/>; or Locuslink, available from <http://www.ncbi.nlm.nih.gov/projects/LocusLink/>.

[1008] Cluster M85491 can be used as a diagnostic marker according to overexpression of transcripts of this cluster in cancer. Expression of such transcripts in normal tissues is also given according to the previously described methods. The term “number” in the left hand column of the table and the numbers on the y-axis of the figure below refer to weighted expression of ESTs in each category, as “parts per million” (ratio of the expression of ESTs for a particular cluster to the expression of all ESTs in that category, according to parts per million).

[1009] Overall, the following results were obtained as shown with regard to the histograms in FIG. 6 and Table 5. This cluster is overexpressed (at least at a minimum level) in the following pathological conditions: epithelial malignant tumors and a mixture of malignant tumors from different tissues.

[1010] As noted above, cluster M85491 features 2 transcript(s), which were listed in Table 1 above. These transcript(s) encode for protein(s) which are variant(s) of protein Ephrin type-B receptor 2 [precursor]. A description of each variant protein according to the present invention is now provided.

[1011] Variant protein M85491_PEA_{—}1_P13 (SEQ ID NO:534) according to the present invention has an amino acid sequence as given at the end of the application; it is encoded by transcript(s) M85491_PEA_{—}1_T16 (SEQ ID NO:1). An alignment is given to the known protein (Ephrin type-B receptor 2 [precursor]) at the end of the application. One or more alignments to one or more previously published protein sequences are given at the end of the application. A brief description of the relationship of the variant protein according to the present invention to each such aligned protein is as follows:

[1012] Comparison report between M85491_PEA_{—}1_P13 (SEQ ID NO:534) and EPB2_HUMAN (SEQ ID NO:616):

[1013] 1. An isolated chimeric polypeptide encoding for M85491_PEA_{—}1_P13 (SEQ ID NO:534) comprising a first amino acid sequence being at least 90% homologous to MALRRLGAALLLLPLLAAVEETLMDSTTATAELGWMVHPPSGWEEVSGYDENMNTIR TYQVCNVFESSQNNWLRTKFIRRRGAHRIHVEMKFSVRDCSSIPSVPGSCKETFNLYYY EADFDSATKTFPNWMENPWVKVDTIAADESFSQVDLGGRVMKINTEVRSFGPVSRSGF YLAFQDYGGCMSLIAVRVFYRKCPRIIQNGAIFQETLSGAESTSLVAARGSCIANAEEVD VPIKLYCNGDGEWLVPIGRCMCKAGFEAVENGTVCRGCPSGTFKANQGDEACTHCPIN SRTTSEGATNCVCRNGYYRADLDPLDMPCTTIPSAPQAVISSVNETSLMLEWTPPRDSG GREDLVYNIICKSCGSGRGACTRCGDNVQYAPRQLGLTEPRIYISDLLAHTQYTFEIQAV NGVTDQSPFSPQFASVNITTNQAAPSAVSIMHQVSRTVDSITLSWSQPDQPNGVILDYEL QYYEK corresponding to amino acids 1-476 of EPB2_HUMAN (SEQ ID NO:616), which also corresponds to amino acids 1-476 of M85491_PEA_{—}1_P13 (SEQ ID NO:534), and a second amino acid sequence being at least 70%, optionally at least 80%, preferably at least 85%, more preferably at least 90% and most preferably at least 95% homologous to a polypeptide having the sequence VPIGWVLSPSPTSLRAPLPG (SEQ ID NO:1480) corresponding to amino acids 477-496 of M85491_PEA_{—}1_P13 (SEQ ID NO:534), wherein said first and second amino acid sequences are contiguous and in a sequential order.

[1014] 2. An isolated polypeptide encoding for a tail of M85491_PEA_{—}1_P13 (SEQ ID NO:534), comprising a polypeptide being at least 70%, optionally at least about 80%, preferably at least about 85%, more preferably at least about 90% and most preferably at least about 95% homologous to the sequence VPIGWVLSPSPTSLRAPLPG (SEQ ID NO:1480) in M85491_PEA_{—}1_P13 (SEQ ID NO:534).

[1015] The location of the variant protein was determined according to results from a number of different software programs and analyses, including analyses from SignalP and other specialized programs. The variant protein is believed to be located as follows with regard to the cell: secreted. The protein localization is believed to be secreted because both signal-peptide prediction programs predict that this protein has a signal peptide, and neither trans-membrane region prediction program predicts that this protein has a trans-membrane region.

[1016] Variant protein M85491_PEA_{—}1_P13 (SEQ ID NO:534) is encoded by the following transcript(s): M85491_PEA_{—}1_T16 (SEQ ID NO:1), for which the sequence(s) is/are given at the end of the application. The coding portion of transcript M85491_PEA_{—}1_T16 (SEQ ID NO:1) is shown in bold; this coding portion starts at position 143 and ends at position 1630. The transcript also has the following SNPs as listed in Table 7 (given according to their position on the nucleotide sequence, with the alternative nucleic acid listed; the last column indicates whether the SNP is known or not; the presence of known SNPs in variant protein M85491_PEA_{—}1_P13 (SEQ ID NO:534) sequence provides support for the deduced sequence of this variant protein according to the present invention).

[1017] Variant protein M85491_PEA_{—}1_P14 (SEQ ID NO:535) according to the present invention has an amino acid sequence as given at the end of the application; it is encoded by transcript(s) M85491_PEA_{—}1_T20 (SEQ ID NO:2). An alignment is given to the known protein (Ephrin type-B receptor 2 [precursor]) at the end of the application. One or more alignments to one or more previously published protein sequences are given at the end of the application. A brief description of the relationship of the variant protein according to the present invention to each such aligned protein is as follows:

[1018] Comparison report between M85491_PEA_{—}1_P14 (SEQ ID NO:535) and EPB2_HUMAN (SEQ ID NO:616):

[1019] 1. An isolated chimeric polypeptide encoding for M85491_PEA_{—}1_P14 (SEQ ID NO:535), comprising a first amino acid sequence being at least 90% homologous to MALRRLGAALLLLPLLAAVEETLMDSTTATAELGWMVHPPSGWEEVSGYDENMNTIR TYQVCNVFESSQNNWLRTKFIRRRGAHRIHVEMKFSVRDCSSIPSVPGSCKETFNLYYY EADFDSATKTFPNWMENPWVKVDTIAADESFSQVDLGGRVMKINTEVRSFGPVSRSGF YLAFQDYGGCMSLIAVRVFYRKCPRIIQNGAIFQETLSGAESTSLVAARGSCIANAEEVD VPIKLYCNGDGEWLVPIGRCMCKAGFEAVENGTVCR corresponding to amino acids 1-270 of EPB2_HUMAN (SEQ ID NO:616), which also corresponds to amino acids 1-270 of M85491_PEA_{—}1_P14 (SEQ ID NO:535), and a second amino acid sequence being at least 70%, optionally at least 80%, preferably at least 85%, more preferably at least 90% and most preferably at least 95% homologous to a polypeptide having the sequence ERQDLTMLSRLVLNSWPQMILPPQPPKVLEL (SEQ ID NO:1481) corresponding to amino acids 271-301 of M85491_PEA_{—}1_P14 (SEQ ID NO:535), wherein said first and second amino acid sequences are contiguous and in a sequential order.

[1020] 2. An isolated polypeptide encoding for a tail of M85491_PEA_{—}1_P14 (SEQ ID NO:535), comprising a polypeptide being at least 70%, optionally at least about 80%, preferably at least about 85%, more preferably at least about 90% and most preferably at least about 95% homologous to the sequence ERQDLTMLSRLVLNSWPQMILPPQPPKVLEL (SEQ ID NO:1481) in M85491_PEA_{—}1_P14 (SEQ ID NO:535).

[1021] The location of the variant protein was determined according to results from a number of different software programs and analyses, including analyses from SignalP and other specialized programs. The variant protein is believed to be located as follows with regard to the cell: secreted. The protein localization is believed to be secreted because both signal-peptide prediction programs predict that this protein has a signal peptide, and neither trans-membrane region prediction program predicts that this protein has a trans-membrane region.

[1022] Variant protein M85491_PEA_{—}1_P14 (SEQ ID NO:535) is encoded by the following transcript(s): M85491_PEA_{—}1_T20 (SEQ ID NO:2), for which the sequence(s) is/are given at the end of the application. The coding portion of transcript M85491_PEA_{—}1_T20 (SEQ ID NO:2) is shown in bold; this coding portion starts at position 143 and ends at position 1045. The transcript also has the following SNPs as listed in Table 8 (given according to their position on the nucleotide sequence, with the alternative nucleic acid listed; the last column indicates whether the SNP is known or not; the presence of known SNPs in variant protein M85491_PEA_{—}1_P14 (SEQ ID NO:535) sequence provides support for the deduced sequence of this variant protein according to the present invention).

[1023] As noted above, cluster M85491 features 11 segment(s), which were listed in Table 2 above and for which the sequence(s) are given at the end of the application. These segment(s) are portions of nucleic acid sequence(s) which are described herein separately because they are of particular interest. A description of each segment according to the present invention is now provided.

[1024] Segment cluster M85491_PEA_{—}1_node_{—}0 (SEQ ID NO:89) according to the present invention is supported by 5 libraries. The number of libraries was determined as previously described. This segment can be found in the following transcript(s): M85491_PEA_{—}1_T16 (SEQ ID NO:1) and M85491_PEA_{—}1_T20 (SEQ ID NO:2). Table 9 below describes the starting and ending position of this segment on each transcript.

[1025] Segment cluster M85491_PEA_{—}1_node_{—}13 (SEQ ID NO:90) according to the present invention is supported by 6 libraries. The number of libraries was determined as previously described. This segment can be found in the following transcript(s): M85491_PEA_{—}1_T20 (SEQ ID NO:2). Table 10 below describes the starting and ending position of this segment on each transcript.

[1026] Microarray (chip) data is also available for this segment as follows. As described above with regard to the cluster itself, various oligonucleotides were tested for being differentially expressed in various disease conditions, particularly cancer. The following oligonucleotides were found to hit this segment, shown in Table 11.

[1027] Segment cluster M85491_PEA_{—}1_node_{—}21 (SEQ ID NO:91) according to the present invention is supported by 18 libraries. The number of libraries was determined as previously described. This segment can be found in the following transcript(s): M85491_PEA_{—}1_T16 (SEQ ID NO:1). Table 12 below describes the starting and ending position of this segment on each transcript.

[1028] Segment cluster M85491_PEA_{—}1_node_{—}23 (SEQ ID NO:92) according to the present invention is supported by 18 libraries. The number of libraries was determined as previously described. This segment can be found in the following transcript(s): M85491_PEA_{—}1_T16 (SEQ ID NO:1). Table 13 below describes the starting and ending position of this segment on each transcript.

[1029] Segment cluster M85491_PEA_{—}1_node_{—}24 (SEQ ID NO:93) according to the present invention is supported by 3 libraries. The number of libraries was determined as previously described. This segment can be found in the following transcript(s): M85491_PEA_{—}1_T16 (SEQ ID NO:1). Table 14 below describes the starting and ending position of this segment on each transcript.

[1030] Segment cluster M85491_PEA_{—}1_node_{—}8 (SEQ ID NO:94) according to the present invention is supported by 25 libraries. The number of libraries was determined as previously described. This segment can be found in the following transcript(s): M85491_PEA_{—}1_T16 (SEQ ID NO:1) and M85491_PEA_{—}1_T20 (SEQ ID NO:2). Table 15 below describes the starting and ending position of this segment on each transcript.

[1031] Microarray (chip) data is also available for this segment as follows. As described above with regard to the cluster itself, various oligonucleotides were tested for being differentially expressed in various disease conditions, particularly cancer. The following oligonucleotides were found to hit this segment with regard to colon cancer, shown in Table 16.

[1032] Segment cluster M85491_PEA_{—}1_node_{—}9 (SEQ ID NO:95) according to the present invention is supported by 20 libraries. The number of libraries was determined as previously described. This segment can be found in the following transcript(s): M85491_PEA_{—}1_T16 (SEQ ID NO:1) and M85491_PEA_{—}1_T20 (SEQ ID NO:2). Table 17 below describes the starting and ending position of this segment on each transcript.

[1033] According to an optional embodiment of the present invention, short segments related to the above cluster are also provided. These segments are up to about 120 bp in length, and so are included in a separate description.

[1034] Segment cluster M85491_PEA_{—}1_node_{—}10 (SEQ ID NO:96) according to the present invention is supported by 17 libraries. The number of libraries was determined as previously described. This segment can be found in the following transcript(s): M85491_PEA_{—}1_T16 (SEQ ID NO:1) and M85491_PEA_{—}1_T20 (SEQ ID NO:2). Table 18 below describes the starting and ending position of this segment on each transcript.

[1035] Segment cluster M85491_PEA_{—}1_node_{—}18 (SEQ ID NO:97) according to the present invention is supported by 15 libraries. The number of libraries was determined as previously described. This segment can be found in the following transcript(s): M85491_PEA_{—}1_T16 (SEQ ID NO:1). Table 19 below describes the starting and ending position of this segment on each transcript.

[1036] Segment cluster M85491_PEA_{—}1_node_{—}19 (SEQ ID NO:98) according to the present invention is supported by 15 libraries. The number of libraries was determined as previously described. This segment can be found in the following transcript(s): M85491_PEA_{—}1_T16 (SEQ ID NO:1). Table 20 below describes the starting and ending position of this segment on each transcript.

[1037] Segment cluster M85491_PEA_{—}1_node_{—}6 (SEQ ID NO:99) according to the present invention is supported by 11 libraries. The number of libraries was determined as previously described. This segment can be found in the following transcript(s): M85491_PEA_{—}1_T16 (SEQ ID NO:1) and M85491_PEA_{—}1_T20 (SEQ ID NO:2). Table 21 below describes the starting and ending position of this segment on each transcript.

Variant protein alignment to the previously known protein:

Sequence name: /tmp/qfmsU9VtxS/DylcLC9j8v:EPB2_HUMAN (SEQ ID NO:616)

Sequence Documentation:

Alignment of: M85491_PEA_{—}1_P13 (SEQ ID NO:534)×EPB2_HUMAN (SEQ ID NO:616) ••

Alignment segment 1/1:

Alignment:

Sequence name: /tmp/rmnzuDbot6/GiHbjeU8iR:EPB2_HUMAN (SEQ ID NO:616)

Sequence Documentation:

Alignment of: M85491_PEA_{—}1_P14 (SEQ ID NO:535)×EPB2_HUMAN (SEQ ID NO:616) ••

Alignment segment 1/1:

Alignment:

[1038] Expression of Ephrin type-B receptor 2 precursor (EC 2.7.1.112) (Tyrosine-protein kinase receptor EPH-3) M85491 transcripts which are detectable by amplicon as depicted in sequence name M85491seg24 (SEQ ID NO:1276) in normal and cancerous colon tissues

[1039] Expression of Ephrin type-B receptor 2 precursor (EC 2.7.1.112) (Tyrosine-protein kinase receptor EPH-3) transcripts detectable by or according to seg24, M85491seg24 amplicon (SEQ ID NO:1276) and M85491seg24F (SEQ ID NO:1274) and M85491seg24R (SEQ ID NO:1275) primers was measured by real time PCR. In parallel the expression of four housekeeping genes—PBGD (GenBank Accession No. BC019323 (SEQ ID NO:1576); amplicon—PBGD-amplicon, SEQ ID NO:531), HPRT1 (GenBank Accession No. NM_{—}000194 (SEQ ID NO:1577); amplicon—HPRT1-amplicon, SEQ ID NO:612), G6PD (GenBank Accession No. NM_{—}000402 (SEQ ID NO:1578); G6PD amplicon, SEQ ID NO:615), and RPS27A (GenBank Accession No. NM_{—}002954 (SEQ ID NO:1579); RPS27A amplicon, SEQ ID NO:1261) was measured similarly. For each RT (RT-PCR) sample, the expression of the above amplicon was normalized to the geometric mean of the quantities of the housekeeping genes. The normalized quantity of each RT sample was then divided by the median of the quantities of the normal post-mortem (PM) samples (Sample Nos. 41, 52, 62-67, 69-71, Table 1, “Tissue samples in testing panel”, above), to obtain a value of fold up-regulation for each sample relative to median of the normal PM samples.

[1040] FIG. 7 is a histogram showing over expression of the above-indicated Ephrin type-B receptor 2 precursor (EC 2.7.1.112) (Tyrosine-protein kinase receptor EPH-3) transcripts in cancerous colon samples relative to the normal samples. Values represent the average of duplicate experiments. Error bars indicate the minimal and maximal values obtained.

[1041] As is evident from FIG. 7, the expression of Ephrin type-B receptor 2 precursor (EC 2.7.1.112) (Tyrosine-protein kinase receptor EPH-3) transcripts detectable by the above amplicon in cancer samples was significantly higher than in the non-cancerous samples (Sample Nos. 41,52,62-67, 69-71 Table 1, “Tissue samples in testing panel”). Notably over-expression of at least 3 fold was found in 13 out of 37 adenocarcinoma samples.

[1042] Statistical analysis was applied to verify the significance of these results, as described below.

[1043] The P value for the difference in the expression levels of Ephrin type-B receptor 2 precursor (EC 2.7.1.112) (Tyrosine-protein kinase receptor EPH-3) transcripts detectable by the above amplicon(s) in colon cancer samples versus the normal tissue samples was determined by T test as 6.83E-04 Threshold of 3 fold over expression was found to differentiate between cancer and normal samples with P value of 2.66E-02 in as checked by exact fisher test. The above values demonstrate statistical significance of the results.

[1044] Primer pairs are also optionally and preferably encompassed within the present invention; for example, for the above experiment, the following primer pair was used as a non-limiting illustrative example only of a suitable primer pair: M85491seg24F forward primer (SEQ ID NO:1274); and M85491seg24R reverse primer (SEQ ID NO:1275).

[1045] The present invention also preferably encompasses any amplicon obtained through the use of any suitable primer pair; for example, for the above experiment, the following amplicon was obtained as a non-limiting illustrative example only of a suitable amplicon: M85491seg24 (SEQ ID NO:1276).

Expression of Ephrin type-B receptor 2 precursor (EC 2.7.1.112) (Tyrosine-protein kinase receptor EPH-3) M85491 transcripts which are detectable by amplicon as depicted in sequence name M85491seg24(SEQ ID NO:1276) in different normal tissues.

[1046] Expression of Ephrin type-B receptor 2 precursor transcripts detectable by or according to M85491 seg24 amplicon(s) (SEQ ID NO:1276) and M85491 seg24F (SEQ ID NO:1274) and M85491 seg24R (SEQ ID NO:1275) was measured by real time PCR. In parallel the expression of four housekeeping genes—RPL19 (GenBank Accession No. NM_{—}000981 (SEQ ID NO:1580); RPL19 amplicon), TATA box (GenBank Accession No. NM_{—}003194 (SEQ ID NO:1581); TATA amplicon), Ubiquitin (GenBank Accession No. BC000449 (SEQ ID NO:1582); amplicon—Ubiquitin-amplicon) and SDHA (GenBank Accession No. NM_{—}004168 (SEQ ID NO:1583); amplicon—SDHA-amplicon) was measured similarly. For each RT sample, the expression of the above amplicon was normalized to the geometric mean of the quantities of the housekeeping genes. The normalized quantity of each RT sample was then divided by the median of the quantities of the lung samples (Sample Nos. 15-17 Table 2 Tissue samples in normal panel), to obtain a value of relative expression of each sample relative to median of the lung samples.

[1047] The results are described in FIG. 8, presenting the histogram showing the expression of M85491 transcripts which are detectable by amplicon as depicted in sequence name M85491seg24 (SEQ ID NO:1276) in different normal tissues.

Description for Cluster T10888

[1048] Cluster T10888 features 4 transcript(s) and 8 segment(s) of interest, the names for which are given in Tables 1 and 2, respectively, the sequences themselves are given at the end of the application. The selected protein variants are given in table 3.

[1049] These sequences are variants of the known protein Carcinoembryonic antigen-related cell adhesion molecule 6 precursor (SwissProt accession identifier CEA6_HUMAN; known also according to the synonyms Normal cross-reacting antigen; Nonspecific crossreacting antigen; CD66c antigen), SEQ ID NO: 617, referred to herein as the previously known protein.

[1050] The sequence for protein Carcinoembryonic antigen-related cell adhesion molecule 6 precursor (SEQ ID NO:617) is given at the end of the application, as “Carcinoembryonic antigen-related cell adhesion molecule 6 precursor amino acid sequence”. Known polymorphisms for this sequence are as shown in Table 4.

[1051] Protein Carcinoembryonic antigen-related cell adhesion molecule 6 precursor (SEQ ID NO:617) localization is believed to be Attached to the membrane by a GPI-anchor.

[1052] The previously known protein also has the following indication(s) and/or potential therapeutic use(s): Cancer. It has been investigated for clinical/therapeutic use in humans, for example as a target for an antibody or small molecule, and/or as a direct therapeutic; available information related to these investigations is as follows. Potential pharmaceutically related or therapeutically related activity or activities of the previously known protein are as follows: Immunostimulant. A therapeutic role for a protein represented by the cluster has been predicted. The cluster was assigned this field because there was information in the drug database or the public databases (e.g., described herein above) that this protein, or part thereof, is used or can be used for a potential therapeutic indication: Imaging agent; Anticancer; Immunostimulant; Immunoconjugate; Monoclonal antibody, murine; Antisense therapy; antibody.

[1053] The following GO Annotation(s) apply to the previously known protein. The following annotation(s) were found: signal transduction; cell-cell signaling, which are annotation(s) related to Biological Process; and integral plasma membrane protein, which are annotation(s) related to Cellular Component.

[1054] The GO assignment relies on information from one or more of the SwissProt/TremB1 Protein knowledgebase, available from <http://www.expasy.ch/sprot/>; or Locuslink, available from <http://www.ncbi.nlm.nih.gov/projects/LocusLink/>.

[1055] Cluster T10888 can be used as a diagnostic marker according to overexpression of transcripts of this cluster in cancer. Expression of such transcripts in normal tissues is also given according to the previously described methods. The term “number” in the right hand column of the table and the numbers on the y-axis of the figure below refer to weighted expression of ESTs in each category, as “parts per million” (ratio of the expression of ESTs for a particular cluster to the expression of all ESTs in that category, according to parts per million).

[1056] Overall, the following results were obtained as shown with regard to the histograms in FIG. 9 and Table 5. This cluster is overexpressed (at least at a minimum level) in the following pathological conditions: colorectal cancer, a mixture of malignant tumors from different tissues, pancreas carcinoma and gastric carcinoma.

[1057] As noted above, cluster T10888 features 4 transcript(s), which were listed in Table 1 above. These transcript(s) encode for protein(s) which are variant(s) of protein Carcinoembryonic antigen-related cell adhesion molecule 6 precursor (SEQ ID NO:617). A description of each variant protein according to the present invention is now provided.

[1058] Variant protein T10888_PEA_{—}1_P2 (SEQ ID NO:536) according to the present invention has an amino acid sequence as given at the end of the application; it is encoded by transcript(s) T10888_PEA_{—}1_T1 (SEQ ID NO:3). An alignment is given to the known protein (Carcinoembryonic antigen-related cell adhesion molecule 6 precursor (SEQ ID NO:617)) at the end of the application. One or more alignments to one or more previously published protein sequences are given at the end of the application. A brief description of the relationship of the variant protein according to the present invention to each such aligned protein is as follows:

[1059] Comparison report between T10888_PEA_{—}1_P2 (SEQ ID NO:536) and CEA6_HUMAN (SEQ ID NO:617):

[1060] 1. An isolated chimeric polypeptide encoding for T10888_PEA_{—}1_P2 (SEQ ID NO:536), comprising a first amino acid sequence being at least 90% homologous to MGPPSAPPCRLHVPWKEVLLTASLLTFWNPPTTAKLTIESTPFNVAEGKEVLLLAHNLP QNRIGYSWYKGERVDGNSLIVGYVIGTQQATPGPAYSGRETIYPNASLLIQNVTQNDTG FYTLQVIKSDLVNEEATGQFHVYPELPKPSISSNNSNPVEDKDAVAFTCEPEVQNTTYL WWVNGQSLPVSPRLQLSNGNMTLTLLSVKRNDAGSYECEIQNPASANRSDPVTLNVLY GPDVPTISPSKANYRPGENLNLSCHAASNPPAQYSWFINGTFQQSTQELFIPNITVNNSGS YMCQAHNSATGLNRTTVTMITVS corresponding to amino acids 1-319 of CEA6_HUMAN (SEQ ID NO:617), which also corresponds to amino acids 1-319 of T10888_PEA_{—}1_P2 (SEQ ID NO:536), and a second amino acid sequence being at least 70%, optionally at least 80%, preferably at least 85%, more preferably at least 90% and most preferably at least 95% homologous to a polypeptide having the sequence DWTRP (SEQ ID NO:1482) corresponding to amino acids 320-324 of T10888_PEA_{—}1_P2 (SEQ ID NO:536), wherein said first and second amino acid sequences are contiguous and in a sequential order.

[1061] 2. An isolated polypeptide encoding for a tail of T10888_PEA_{—}1_P2 (SEQ ID NO:536), comprising a polypeptide being at least 70%, optionally at least about 80%, preferably at least about 85%, more preferably at least about 90% and most preferably at least about 95% homologous to the sequence DWTRP (SEQ ID NO:1482) in T10888_PEA_{—}1_P2 (SEQ ID NO:536).

[1062] The location of the variant protein was determined according to results from a number of different software programs and analyses, including analyses from SignalP and other specialized programs. The variant protein is believed to be located as follows with regard to the cell: secreted. The protein localization is believed to be secreted because both signal-peptide prediction programs predict that this protein has a signal peptide, and neither trans-membrane region prediction program predicts that this protein has a trans-membrane region.

[1063] Variant protein T10888_PEA_{—}1_P2 (SEQ ID NO:536) also has the following non-silent SNPs (Single Nucleotide Polymorphisms) as listed in Table 7, (given according to their position(s) on the amino acid sequence, with the alternative amino acid(s) listed; the last column indicates whether the SNP is known or not; the presence of known SNPs in variant protein T10888_PEA_{—}1_P2 (SEQ ID NO:536) sequence provides support for the deduced sequence of this variant protein according to the present invention).

[1064] Variant protein T10888_PEA_{—}1_P2 (SEQ ID NO:536) is encoded by the following transcript(s): T10888_PEA_{—}1_T1 (SEQ ID NO:3) for which the sequence(s) is/are given at the end of the application. The coding portion of transcript T10888_PEA_{—}1_T1 (SEQ ID NO:3) is shown in bold; this coding portion starts at position 151 and ends at position 1122. The transcript also has the following SNPs as listed in Table 8 (given according to their position on the nucleotide sequence, with the alternative nucleic acid listed; the last column indicates whether the SNP is known or not; the presence of known SNPs in variant protein T10888_PEA_{—}1_P2 (SEQ ID NO:536) sequence provides support for the deduced sequence of this variant protein according to the present invention).

[1065] Variant protein T10888_PEA_{—}1_P4 (SEQ ID NO:537) according to the present invention has an amino acid sequence as given at the end of the application; it is encoded by transcript(s) T10888_PEA_{—}1_T4 (SEQ ID NO:4). An alignment is given to the known protein (Carcinoembryonic antigen-related cell adhesion molecule 6 precursor (SEQ ID NO:617)) at the end of the application. One or more alignments to one or more previously published protein sequences are given at the end of the application. A brief description of the relationship of the variant protein according to the present invention to each such aligned protein is as follows:

[1066] Comparison report between T10888_PEA_{—}1_P4 (SEQ ID NO:537) and CEA6_HUMAN (SEQ ID NO:617):

[1067] 1. An isolated chimeric polypeptide encoding for T10888_PEA_{—}1_P4 (SEQ ID NO:537), comprising a first amino acid sequence being at least 90% homologous to MGPPSAPPCRLHVPWKEVLLTASLLTFWNPPTTAKLTIESTPFNVAEGKEVLLLAHNLP QNRIGYSWYKGERVDGNSLIVGYVIGTQQATPGPAYSGRETIYPNASLLIQNVTQNDTG FYTLQVIKSDLVNEEATGQFHVYPELPKPSISSNNSNPVEDKDAVAFTCEPEVQNTTYL WWVNGQSLPVSPRLQLSNGNMTLTLLSVKRNDAGSYECEIQNPASANRSDPVTLNVL corresponding to amino acids 1-234 of CEA6_HUMAN (SEQ ID NO:617), which also corresponds to amino acids 1-234 of T10888_PEA_{—}1_P4 (SEQ ID NO:537), and a second amino acid sequence being at least 70%, optionally at least 80%, preferably at least 85%, more preferably at least 90% and most preferably at least 95% homologous to a polypeptide having the sequence LLLSSQLWPPSASRLECWPGWL (SEQ ID NO:1483) corresponding to amino acids 235-256 of T10888_PEA_{—}1_P4 (SEQ ID NO:537), wherein said first and second amino acid sequences are contiguous and in a sequential order.

[1068] 2. An isolated polypeptide encoding for a tail of T10888_PEA_{—}1_P4 (SEQ ID NO:537), comprising a polypeptide being at least 70%, optionally at least about 80%, preferably at least about 85%, more preferably at least about 90% and most preferably at least about 95% homologous to the sequence LLLSSQLWPPSASRLECWPGWL (SEQ ID NO:1483) in T10888_PEA_{—}1_P4 (SEQ ID NO:537).

[1069] Comparison report between T10888_PEA_{—}1_P4 (SEQ ID NO:537) and Q13774 (SEQ ID NO:1382):

[1070] 1. An isolated chimeric polypeptide encoding for T10888_PEA_{—}1_P4 (SEQ ID NO:537), comprising a first amino acid sequence being at least 90% homologous to MGPPSAPPCRLHVPWKEVLLTASLLTFWNPPTTAKLTIESTPFNVAEGKEVLLLAHNLP QNRIGYSWYKGERVDGNSLIVGYVIGTQQATPGPAYSGRETIYPNASLLIQNVTQNDTG FYTLQVIKSDLVNEEATGQFHVYPELPKPSISSNNSNPVEDKDAVAFTCEPEVQNTTYL WWVNGQSLPVSPRLQLSNGNMTLTLLSVKRNDAGSYECEIQNPASANRSDPVTLNVL corresponding to amino acids 1-234 of Q13774 (SEQ ID NO:1382), which also corresponds to amino acids 1-234 of T10888_PEA_{—}1_P4 (SEQ ID NO:537), and a second amino acid sequence being at least 70%, optionally at least 80%, preferably at least 85%, more preferably at least 90% and most preferably at least 95% homologous to a polypeptide having the sequence LLLSSQLWPPSASRLECWPGWL (SEQ ID NO:1483) corresponding to amino acids 235-256 of T10888_PEA_{—}1_P4 (SEQ ID NO:537), wherein said first and second amino acid sequences are contiguous and in a sequential order.

[1071] 2. An isolated polypeptide encoding for a tail of T10888_PEA_{—}1_P4 (SEQ ID NO:537), comprising a polypeptide being at least 70%, optionally at least about 80%, preferably at least about 85%, more preferably at least about 90% and most preferably at least about 95% homologous to the sequence LLLSSQLWPPSASRLECWPGWL (SEQ ID NO:1483) in T10888_PEA_{—}1_{—P}4 (SEQ ID NO:537).

[1072] The location of the variant protein was determined according to results from a number of different software programs and analyses, including analyses from SignalP and other specialized programs. The variant protein is believed to be located as follows with regard to the cell: secreted. The protein localization is believed to be secreted because both signal-peptide prediction programs predict that this protein has a signal peptide, and neither trans-membrane region prediction program predicts that this protein has a trans-membrane region.

[1073] Variant protein T10888_PEA_{—}1_P4 (SEQ ID NO:537) also has the following non-silent SNPs (Single Nucleotide Polymorphisms) as listed in Table 9, (given according to their position(s) on the amino acid sequence, with the alternative amino acid(s) listed; the last column indicates whether the SNP is known or not; the presence of known SNPs in variant protein T10888_PEA_{—}1_P4 (SEQ ID NO:537) sequence provides support for the deduced sequence of this variant protein according to the present invention).

[1074] Variant protein T10888_PEA_{—}1_P4 (SEQ ID NO:537) is encoded by the following transcript(s): T10888_PEA_{—}1_T4 (SEQ ID NO:4), for which the sequence(s) is/are given at the end of the application. The coding portion of transcript T10888_PEA_{—}1_T4 (SEQ ID NO:4) is shown in bold; this coding portion starts at position 151 and ends at position 918. The transcript also has the following SNPs as listed in Table 10 (given according to their position on the nucleotide sequence, with the alternative nucleic acid listed; the last column indicates whether the SNP is known or not; the presence of known SNPs in variant protein T10888_PEA_{—}1_P4 (SEQ ID NO:537) sequence provides support for the deduced sequence of this variant protein according to the present invention).

[1075] Variant protein T10888_PEA_{—}1_P5 (SEQ ID NO:538) according to the present invention has an amino acid sequence as given at the end of the application; it is encoded by transcript(s) T10888_PEA_{—}1_T5 (SEQ ID NO:5). An alignment is given to the known protein (Carcinoembryonic antigen-related cell adhesion molecule 6 precursor (SEQ ID NO:617)) at the end of the application. One or more alignments to one or more previously published protein sequences are given at the end of the application. A brief description of the relationship of the variant protein according to the present invention to each such aligned protein is as follows:

[1076] Comparison report between T10888_PEA_{—}1_P5 (SEQ ID NO:538) and CEA6_HUMAN (SEQ ID NO:617):

[1077] 1. An isolated chimeric polypeptide encoding for T10888_PEA_{—}1_{—P}5 (SEQ ID NO:538), comprising a first amino acid sequence being at least 90% homologous to MGPPSAPPCRLHVPWKEVLLTASLLTFWNPPTTAKLTIESTPFNVAEGKEVLLLAHNLP QNRIGYSWYKGERVDGNSLIVGYVIGTQQATPGPAYSGRETIYPNASLLIQNVTQNDTG FYTLQVIKSDLVNEEATGQFHVYPELPKPSISSNNSNPVEDKDAVAFTCEPEVQNTTYL WWVNGQSLPVSPRLQLSNGNMTLTLLSVKRNDAGSYECEIQNPASANRSDPVTLNVLY GPDVPTISPSKANYRPGENLNLSCHAASNPPAQYSWFINGTFQQSTQELFIPNITVNNSGS YMCQAHNSATGLNRTTVTMITVSG corresponding to amino acids 1-320 of CEA6_HUMAN (SEQ ID NO:617), which also corresponds to amino acids 1-320 of T10888_PEA_{—}1_P5 (SEQ ID NO:538), and a second amino acid sequence being at least 70%, optionally at least 80%, preferably at least 85%, more preferably at least 90% and most preferably at least 95% homologous to a polypeptide having the sequence KWIHEALASHFQVESGSQRRARKKFSFPTCVQGAHANPKFSPEPSQFTSADSFPLVFLFF VVFCFLISHV (SEQ ID NO:1484) corresponding to amino acids 321-390 of T10888_PEA_{—}1_P5 (SEQ ID NO:538), wherein said first and second amino acid sequences are contiguous and in a sequential order.

[1078] 2. An isolated polypeptide encoding for a tail of T10888_PEA_{—}1_P5 (SEQ ID NO:538), comprising a polypeptide being at least 70%, optionally at least about 80%, preferably at least about 85%, more preferably at least about 90% and most preferably at least about 95% homologous to the sequence KWIHEALASHFQVESGSQRRARKKFSFPTCVQGAHANPKFSPEPSQFTSADSFPLVFLFF VVFCFLISHV (SEQ ID NO:1484) in T10888_PEA_{—}1_P5 (SEQ ID NO:538).

[1079] The location of the variant protein was determined according to results from a number of different software programs and analyses, including analyses from SignalP and other specialized programs. The variant protein is believed to be located as follows with regard to the cell: membrane. The protein localization is believed to be membrane because although both signal-peptide prediction programs agree that this protein has a signal peptide, both trans-membrane region prediction programs predict that this protein has a trans-membrane region downstream of this signal peptide.

[1080] Variant protein T10888_PEA_{—}1_P5 (SEQ ID NO:538) also has the following non-silent SNPs (Single Nucleotide Polymorphisms) as listed in Table 11, (given according to their position(s) on the amino acid sequence, with the alternative amino acid(s) listed; the last column indicates whether the SNP is known or not; the presence of known SNPs in variant protein T10888_PEA_{—}1_P5 (SEQ ID NO:538) sequence provides support for the deduced sequence of this variant protein according to the present invention).

[1081] Variant protein T10888_PEA_{—}1_P5 (SEQ ID NO:538) is encoded by the following transcript(s): T10888_PEA_{—}1_T5 (SEQ ID NO:5), for which the sequence(s) is/are given at the end of the application. The coding portion of transcript T10888_PEA_{—}1_T5 (SEQ ID NO:5) is shown in bold; this coding portion starts at position 151 and ends at position 1320. The transcript also has the following SNPs as listed in Table 12 (given according to their position on the nucleotide sequence, with the alternative nucleic acid listed; the last column indicates whether the SNP is known or not; the presence of known SNPs in variant protein T10888_PEA_{—}1_P5 (SEQ ID NO:538) sequence provides support for the deduced sequence of this variant protein according to the present invention).

[1082] Variant protein T10888_PEA_{—}1_P6 (SEQ ID NO:539) according to the present invention has an amino acid sequence as given at the end of the application; it is encoded by transcript(s) T10888_PEA_{—}1_T6 (SEQ ID NO:6). An alignment is given to the known protein (Carcinoembryonic antigen-related cell adhesion molecule 6 precursor (SEQ ID NO:617)) at the end of the application. One or more alignments to one or more previously published protein sequences are given at the end of the application.

[1083] Comparison report between T10888_PEA_{—}1_P6 (SEQ ID NO:539) and CEA6_HUMAN (SEQ ID NO:617):

[1084] 1. An isolated chimeric polypeptide encoding for T10888_PEA_{—}1_P6 (SEQ ID NO:539) comprising a first amino acid sequence being at least 90% homologous to MGPPSAPPCRLHVPWKEVLLTASLLTFWNPPTTAKLTIESTPFNVAEGKEVLLLAHNLP QNRIGYSWYKGERVDGNSLIVGYVIGTQQATPGPAYSGRETIYPNASLLIQNVTQNDTG FYTLQVIKSDLVNEEATGQFHVY corresponding to amino acids 1-141 of CEA6_HUMAN (SEQ ID NO:617), which also corresponds to amino acids 1-141 of T10888_PEA_{—}1_P6 (SEQ ID NO:539), and a second amino acid sequence being at least 70%, optionally at least 80%, preferably at least 85%, more preferably at least 90% and most preferably at least 95% homologous to a polypeptide having the sequence REYFHMTSGCWGSVLLPTYGIVRPGLCLWPSLHYILYQGLDI (SEQ ID NO:1485) corresponding to amino acids 142-183 of T10888_PEA_{—}1_P6 (SEQ ID NO:539), wherein said first and second amino acid sequences are contiguous and in a sequential order.

[1085] 2. An isolated polypeptide encoding for a tail of T10888_PEA_{—}1_P6 (SEQ ID NO:539), comprising a polypeptide being at least 70%, optionally at least about 80%, preferably at least about 85%, more preferably at least about 90% and most preferably at least about 95% homologous to the sequence REYFHMTSGCWGSVLLPTYGIVRPGLCLWPSLHYILYQGLDI (SEQ ID NO:1485) in T10888_PEA_{—}1_{—P}6 (SEQ ID NO:539).

[1086] The location of the variant protein was determined according to results from a number of different software programs and analyses, including analyses from SignalP and other specialized programs. The variant protein is believed to be located as follows with regard to the cell: secreted. The protein localization is believed to be secreted because both signal-peptide prediction programs predict that this protein has a signal peptide, and neither trans-membrane region prediction program predicts that this protein has a trans-membrane region.

[1087] Variant protein T10888_PEA_{—}1_P6 (SEQ ID NO:539) also has the following non-silent SNPs (Single Nucleotide Polymorphisms) as listed in Table 13, (given according to their position(s) on the amino acid sequence, with the alternative amino acid(s) listed; the last column indicates whether the SNP is known or not; the presence of known SNPs in variant protein T10888_PEA_{—}1_P6 (SEQ ID NO:539) sequence provides support for the deduced sequence of this variant protein according to the present invention).

[1088] Variant protein T10888_PEA_{—}1_P6 (SEQ ID NO:539) is encoded by the following transcript(s): T10888_PEA_{—}1_T6 (SEQ ID NO:6), for which the sequence(s) is/are given at the end of the application. The coding portion of transcript T10888_PEA_{—}1_T6 (SEQ ID NO:6) is shown in bold; this coding portion starts at position 151 and ends at position 699. The transcript also has the following SNPs as listed in Table 14 (given according to their position on the nucleotide sequence, with the alternative nucleic acid listed; the last column indicates whether the SNP is known or not; the presence of known SNPs in variant protein T10888_PEA_{—}1_P6 (SEQ ID NO:539) sequence provides support for the deduced sequence of this variant protein according to the present invention).

[1089] As noted above, cluster T10888 features 8 segment(s), which were listed in Table 2 above and for which the sequence(s) are given at the end of the application. These segment(s) are portions of nucleic acid sequence(s) which are described herein separately because they are of particular interest. A description of each segment according to the present invention is now provided.

[1090] Segment cluster T10888_PEA_{—}1_node_{—}11 (SEQ ID NO:100) according to the present invention is supported by 57 libraries. The number of libraries was determined as previously described. This segment can be found in the following transcript(s): T10888_PEA_{—}1_T1 (SEQ ID NO:3) and T10888_PEA_{—}1_T5 (SEQ ID NO:5). Table 15 below describes the starting and ending position of this segment on each transcript.

[1091] Segment cluster T10888_PEA_{—}1_node_{—}12 (SEQ ID NO:101) according to the present invention is supported by 9 libraries. The number of libraries was determined as previously described. This segment can be found in the following transcript(s): T10888_PEA_{—}1_T5 (SEQ ID NO:5). Table 16 below describes the starting and ending position of this segment on each transcript.

[1092] Segment cluster T10888_PEA_{—}1_node_{—}17 (SEQ ID NO:102) according to the present invention is supported by 160 libraries. The number of libraries was determined as previously described. This segment can be found in the following transcript(s): T10888_PEA_{—}1_T1 (SEQ ID NO:3) and T10888_PEA_{—}1_T4 (SEQ ID NO:4). Table 17 below describes the starting and ending position of this segment on each transcript.

[1093] Segment cluster T10888_PEA_{—}1_node_{—}4 (SEQ ID NO:103) according to the present invention is supported by 61 libraries. The number of libraries was determined as previously described. This segment can be found in the following transcript(s): T10888_PEA_{—}1_T1 (SEQ ID NO:3), T10888_PEA_{—}1_T4 (SEQ ID NO:4), T10888_PEA_{—}1_T5 (SEQ ID NO:5) and T10888_PEA_{—}1_T6 (SEQ ID NO:6). Table 18 below describes the starting and ending position of this segment on each transcript.

[1094] Segment cluster T10888_PEA_{—}1_node_{—}6 (SEQ ID NO:104) according to the present invention is supported by 81 libraries. The number of libraries was determined as previously described. This segment can be found in the following transcript(s): T10888_PEA_{—}1_T1 (SEQ ID NO:3), T10888_PEA_{—}1_T4 (SEQ ID NO:4), T10888_PEA_{—}1_T5 (SEQ ID NO:5) and T10888_PEA_{—}1_T6 (SEQ ID NO:6). Table 19 below describes the starting and ending position of this segment on each transcript.

[1095] Segment cluster T10888_PEA_{—}1_node_{—}7 (SEQ ID NO:105) according to the present invention is supported by 4 libraries. The number of libraries was determined as previously described. This segment can be found in the following transcript(s): T10888_PEA_{—}1_T6 (SEQ ID NO:6). Table 20 below describes the starting and ending position of this segment on each transcript.

[1096] Segment cluster T10888_PEA_{—}1_node_{—}9 (SEQ ID NO:106) according to the present invention is supported by 72 libraries. The number of libraries was determined as previously described. This segment can be found in the following transcript(s): T10888_PEA_{—}1_T1 (SEQ ID NO:3), T10888_PEA_{—}1_T4 (SEQ ID NO:4) and T10888_PEA_{—}1_T5 (SEQ ID NO:5) Table 21 below describes the starting and ending position of this segment on each transcript.

[1097] According to an optional embodiment of the present invention, short segments related to the above cluster are also provided. These segments are up to about 120 bp in length, and so are included in a separate description.

[1098] Segment cluster T10888_PEA_{—}1_node_{—}15 (SEQ ID NO:107) according to the present invention is supported by 39 libraries. The number of libraries was determined as previously described. This segment can be found in the following transcript(s): T10888_PEA_{—}1_T4 (SEQ ID NO:4). Table 22 below describes the starting and ending position of this segment on each transcript.

Variant protein alignment to the previously known protein:

Sequence name: /tmp/tM4EgaoKvm/vuztUrlRc7:CEA6_HUMAN (SEQ ID NO:617)

Sequence Documentation:

Alignment of: T10888_PEA_{—}1_P2 (SEQ ID NO:536)×CEA6_HUMAN (SEQ ID NO:617).

Alignment segment 1/1:

Alignment:

Sequence name: /tmp/Yjl1gj7TCe/PgdufzLOlW:CEA6_HUMAN (SEQ ID NO:617)

Sequence Documentation:

Alignment of: T10888_PEA_{—}1_P4 (SEQ ID NO:537)×CEA6_HUMAN (SEQ ID NO:617)••

Alignment segment 1/1:

Alignment:

Sequence name: /tmp/Yjl gj7TCe/PgdufzLOlW:Q13774 (SEQ ID NO:1382)

Sequence Documentation:

Alignment of: T10888_PEA_{—}1_P4 (SEQ ID NO:537)×Q13774 (SEQ ID NO:1382)••

Alignment segment 1/1:

Alignment:

Sequence name: /tmp/x5xDBacdpj/rTXRGepv3y:CEA6_HUMAN (SEQ ID NO:617)

Sequence Documentation:

Alignment of: T10888_PEA_{—}1_P5 (SEQ ID NO:538)×CEA6_HUMAN (SEQ ID NO:617)••

Alignment segment 1/1:

Alignment:

Sequence name: /tmp/VAhvYFeatq/QNEM573uCo:CEA6_HUMAN (SEQ ID NO:617)

Sequence Documentation:

Alignment of: T10888_PEA_{—}1_P6 (SEQ ID NO:539)×CEA6_HUMAN (SEQ ID NO:617) ••

Alignment segment 1/1:

Alignment:

[1099] Alignment of: T10888_PEA_{—}1_P6 (SEQ ID NO:539)×CEA6_HUMAN (SEQ ID NO:617) ••

Alignment segment 1/1:

Alignment:

[1100] Expression of CEA6_HUMAN Carcinoembryonic antigen-related cell adhesion molecule 6 (T10888)] transcripts which are detectable by amplicon as depicted in sequence name [T10888 junc11-17] (SEQ ID NO:1279) in normal and cancerous colon tissues.

[1101] Expression of CEA6_HUMAN Carcinoembryonic antigen-related cell adhesion molecule 6 transcripts detectable by or according to junc11-17 [node(s)/edge], T10888 junc11-17 amplicon (SEQ ID NO:1279) and juncI 1-17 primers (SEQ ID NO:1277-1278) was measured by real time PCR. In parallel the expression of four housekeeping genes—PBGD (GenBank Accession No. BC019323 (SEQ ID NO:1576); amplicon—PBGD-amplicon, SEQ ID NO:531), HPRT1 (GenBank Accession No. NM_{—}000194 (SEQ ID NO:1577); amplicon—HPRT1-amplicon, SEQ ID NO:612), G6PD (GenBank Accession No. NM_{—}000402 (SEQ ID NO:1578); G6PD amplicon, SEQ ID NO:615), and RPS27A (GenBank Accession No. NM_{—}002954 (SEQ ID NO:1579); RPS27A amplicon, SEQ ID NO:1261), was measured similarly. For each RT sample, the expression of the above amplicon was normalized to the geometric mean of the quantities of the housekeeping genes. The normalized quantity of each RT sample was then divided by the median of the quantities of the normal post-mortem (PM) samples (Sample Nos. 41, 52, 62-67, 69-71, Table 1, “Tissue samples in testing panel”, above), to obtain a value of fold up-regulation for each sample relative to median of the normal PM samples.

[1102] FIG. 10 is a histogram showing over expression of the above-indicated CEA6_HUMAN Carcinoembryonic antigen-related cell adhesion molecule 6 transcripts in cancerous colon samples relative to the normal samples. As is evident from FIG. 10, the expression of CEA6_HUMAN Carcinoembryonic antigen-related cell adhesion molecule 6 transcripts detectable by the above amplicon(s) in cancer samples was significantly higher than in the non-cancerous samples (Sample Nos. 41, 52, 62-67, 69-71, Table 1, “Tissue samples in testing panel”, above). Notably an over-expression of at least 3 fold was found in 15 out of 36 adenocarcinoma samples

[1103] Statistical analysis was applied to verify the significance of these results, as described below.

[1104] The P value for the difference in the expression levels of CEA6_HUMAN Carcinoembryonic antigen-related cell adhesion molecule 6 transcripts detectable by the above amplicon(s) in colon cancer samples versus the normal tissue samples was determined by T test as 5.36E-03.

[1105] Threshold of 3 fold overexpression was found to differentiate between cancer and normal samples with P value of 7.41E-03 as checked by exact fisher test. The above values demonstrate statistical significance of the results.

[1106] Primer pairs are also optionally and preferably encompassed within the present invention; for example, for the above experiment, the following primer pair was used as a non-limiting illustrative example only of a suitable primer pair: T10888junc11-17F forward primer (SEQ ID NO:1277); and T10888junc11-17R reverse primer (SEQ ID NO:1278).

[1107] The present invention also preferably encompasses any amplicon obtained through the use of any suitable primer pair; for example, for the above experiment, the following amplicon was obtained as a non-limiting illustrative example only of a suitable amplicon: T10888junc11-17 (SEQ ID NO:1279).

[1108] Expression of CEA6_HUMAN Carcinoembryonic antigen-related cell adhesion molecule 6 T10888 transcripts, which are detectable by amplicon as depicted in sequence name T10888junc11-17 (SEQ ID NO:1282) in different normal tissues.

[1109] Expression of CEA6_HUMAN Carcinoembryonic antigen-related cell adhesion molecule 6 transcripts detectable by or according to T10888 junc11-17 amplicon (SEQ ID NO:1282) and T10888 junc11-17F (SEQ ID NO:1280) and T10888 junc11-17R (SEQ ID NO:1281) was measured by real time PCR. In parallel the expression of four housekeeping genes—RPL19 (GenBank Accession No. NM_{—}000981 (SEQ ID NO:1580); RPL19 amplicon, SEQ ID NO:1264), TATA box (GenBank Accession No. NM_{—}003194 (SEQ ID NO:1581); TATA amplicon, SEQ ID NO:1267), Ubiquitin (GenBank Accession No. BC000449 (SEQ ID NO:1582); amplicon—Ubiquitin-amplicon) and SDHA (GenBank Accession No. NM_{—}004168 (SEQ ID NO:1583); amplicon—SDHA-amplicon, SEQ ID NO:1273) was measured similarly. For each RT sample, the expression of the above amplicon was normalized to the geometric mean of the quantities of the housekeeping genes. The normalized quantity of each RT sample was then divided by the median of the quantities of the ovary samples (Sample Nos. 18-20 Table 2 Tissue samples in normal panel), to obtain a value of relative expression of each sample relative to median of the ovary samples.

[1110] The results are described in FIG. 11, presenting the histogram showing the expression of T10888 transcripts, which are detectable by amplicon as depicted in sequence name T10888junc11-17 (SEQ ID NO:1282) in different normal tissues.

Description for Cluster H14624

[1111] Cluster H14624 features 1 transcript(s) and 15 segment(s) of interest, the names for which are given in Tables 1 and 2, respectively, the sequences themselves are given at the end of the application. The selected protein variants are given in table 3.

[1112] Cluster H14624 can be used as a diagnostic marker according to overexpression of transcripts of this cluster in cancer. Expression of such transcripts in normal tissues is also given according to the previously described methods. The term “number” in the left hand column of the table and the numbers on the y-axis of the figure below refer to weighted expression of ESTs in each category, as “parts per million” (ratio of the expression of ESTs for a particular cluster to the expression of all ESTs in that category, according to parts per million).

[1113] Overall, the following results were obtained as shown with regard to the histograms in FIG. 12 and Table 4. This cluster is overexpressed (at least at a minimum level) in the following pathological conditions: colorectal cancer, epithelial malignant tumors, a mixture of malignant tumors from different tissues, lung malignant tumors and pancreas carcinoma.

[1114] As noted above, cluster H14624 features 1 transcript(s), which were listed in Table 1 above. A description of each variant protein according to the present invention is now provided.

[1115] Variant protein H14624_P15 (SEQ ID NO:540) according to the present invention has an amino acid sequence as given at the end of the application; it is encoded by transcript(s) H14624_T20 (SEQ ID NO:7). One or more alignments to one or more previously published protein sequences are given at the end of the application. A brief description of the relationship of the variant protein according to the present invention to each such aligned protein is as follows:

[1116] Comparison report between H14624_P15 (SEQ ID NO:540) and Q9HAP5 (SEQ ID NO:1384) (SEQ ID NO:1384):

[1117] 1. An isolated chimeric polypeptide encoding for H14624_P15 (SEQ ID NO:540) comprising a first amino acid sequence being at least 90% homologous to MLQGPGSLLLLFLASHCCLGSARGLFLFGQPDFSYKRSNCKPIPANLQLCHGIEYQNMR LPNLLGHETMKEVLEQAGAWIPLVMKQCHPDTKKFLCSLFAPVCLDDLDETIQPCHSLC VQVKDRCAPVMSAFGFPWPDMLECDRFPQDNDLCIPLASSDHLLPATEE corresponding to amino acids 1-167 of Q9HAP5 (SEQ ID NO:1384), which also corresponds to amino acids 1-167 of H14624_P15 (SEQ ID NO:540), and a second amino acid sequence being at least 70%, optionally at least 80%, preferably at least 85%, more preferably at least 90% and most preferably at least 95% homologous to a polypeptide having the sequence GKPSLLLPHSLLG (SEQ ID NO:1486) corresponding to amino acids 168-180 of H14624_P15 (SEQ ID NO:540), wherein said first and second amino acid sequences are contiguous and in a sequential order.

[1118] 2. An isolated polypeptide encoding for a tail of H14624_P15 (SEQ ID NO:540) comprising a polypeptide being at least 70%, optionally at least about 80%, preferably at least about 85%, more preferably at least about 90% and most preferably at least about 95% homologous to the sequence GKPSLLLPHSLLG (SEQ ID NO:1486) in H14624_P15 (SEQ ID NO:540).

[1119] The location of the variant protein was determined according to results from a number of different software programs and analyses, including analyses from SignalP and other specialized programs. The variant protein is believed to be located as follows with regard to the cell: secreted. The protein localization is believed to be secreted because both signal-peptide prediction programs predict that this protein has a signal peptide, and neither trans-membrane region prediction program predicts that this protein has a trans-membrane region.

[1120] Variant protein H14624_P15 (SEQ ID NO:540) also has the following non-silent SNPs (Single Nucleotide Polymorphisms) as listed in Table 6, (given according to their position(s) on the amino acid sequence, with the alternative amino acid(s) listed; the last column indicates whether the SNP is known or not; the presence of known SNPs in variant protein H14624_P15 (SEQ ID NO:540) sequence provides support for the deduced sequence of this variant protein according to the present invention).

[1121] Variant protein H14624_P15 (SEQ ID NO:540) is encoded by the following transcript(s): H14624_T20 (SEQ ID NO:7), for which the sequence(s) is/are given at the end of the application. The coding portion of transcript H14624_T20 (SEQ ID NO:7) is shown in bold; this coding portion starts at position 857 and ends at position 1396. The transcript also has the following SNPs as listed in Table 7 (given according to their position on the nucleotide sequence, with the alternative nucleic acid listed; the last column indicates whether the SNP is known or not; the presence of known SNPs in variant protein H14624_P15 (SEQ ID NO:540) sequence provides support for the deduced sequence of this variant protein according to the present invention).

[1122] As noted above, cluster H14624 features 15 segment(s), which were listed in Table 2 above and for which the sequence(s) are given at the end of the application. These segment(s) are portions of nucleic acid sequence(s) which are described herein separately because they are of particular interest. A description of each segment according to the present invention is now provided.

[1123] Segment cluster H14624_node_{—}0 (SEQ ID NO:108) according to the present invention is supported by 3 libraries. The number of libraries was determined as previously described. This segment can be found in the following transcript(s): H14624_T20 (SEQ ID NO:7). Table 8 below describes the starting and ending position of this segment on each transcript.

[1124] Segment cluster H14624_node_{—}16 (SEQ ID NO:109) according to the present invention is supported by 3 libraries. The number of libraries was determined as previously described. This segment can be found in the following transcript(s): H14624_T20 (SEQ ID NO:7). Table 9 below describes the starting and ending position of this segment on each transcript.

[1125] Segment cluster H14624_node_{—}3 (SEQ ID NO:110) according to the present invention is supported by 67 libraries. The number of libraries was determined as previously described. This segment can be found in the following transcript(s): H14624_T20 (SEQ ID NO:7). Table 10 below describes the starting and ending position of this segment on each transcript.

[1126] According to an optional embodiment of the present invention, short segments related to the above cluster are also provided. These segments are up to about 120 bp in length, and so are included in a separate description.

[1127] Segment cluster H14624_node_{—}10 (SEQ ID NO:111) according to the present invention can be found in the following transcript(s): H14624_T20 (SEQ ID NO:7). Table 11 below describes the starting and ending position of this segment on each transcript.

[1128] Segment cluster H14624_node_{—}11 (SEQ ID NO:112) according to the present invention is supported by 99 libraries. The number of libraries was determined as previously described. This segment can be found in the following transcript(s): H14624_T20 (SEQ ID NO:7). Table 12 below describes the starting and ending position of this segment on each transcript.

[1129] Segment cluster H14624_node_{—}12 (SEQ ID NO:113) according to the present invention can be found in the following transcript(s): H14624_T20 (SEQ ID NO:7). Table 13 below describes the starting and ending position of this segment on each transcript.

[1130] Segment cluster H14624_node_{—}13 (SEQ ID NO:114) according to the present invention is supported by 124 libraries. The number of libraries was determined as previously described. This segment can be found in the following transcript(s): H14624_T20 (SEQ ID NO:7). Table 14 below describes the starting and ending position of this segment on each transcript.

[1131] Segment cluster H14624_node_{—}14 (SEQ ID NO:115) according to the present invention is supported by 114 libraries. The number of libraries was determined as previously described. This segment can be found in the following transcript(s): H14624_T20 (SEQ ID NO:7). Table 15 below describes the starting and ending position of this segment on each transcript.

[1132] Segment cluster H14624_node_{—}15 (SEQ ID NO:116) according to the present invention is supported by 124 libraries. The number of libraries was determined as previously described. This segment can be found in the following transcript(s): H14624_T20 (SEQ ID NO:7). Table 16 below describes the starting and ending position of this segment on each transcript.

[1133] Segment cluster H14624_node_{—}4 (SEQ ID NO:117) according to the present invention is supported by 65 libraries. The number of libraries was determined as previously described. This segment can be found in the following transcript(s): H14624_T20 (SEQ ID NO:7). Table 17 below describes the starting and ending position of this segment on each transcript.

[1134] Segment cluster H14624_node_{—}5 (SEQ ID NO:118) according to the present invention can be found in the following transcript(s): H14624_T20 (SEQ ID NO:7). Table 18 below describes the starting and ending position of this segment on each transcript.

[1135] Segment cluster H14624_node_{—}6 (SEQ ID NO:119) according to the present invention can be found in the following transcript(s): H14624_T20 (SEQ ID NO:7). Table 19 below describes the starting and ending position of this segment on each transcript.

[1136] Segment cluster H14624_node_{—}7 (SEQ ID NO:120) according to the present invention can be found in the following transcript(s): H14624_T20 (SEQ ID NO:7). Table 20 below describes the starting and ending position of this segment on each transcript.

[1137] Segment cluster H14624_node_{—}8 (SEQ ID NO:121) according to the present invention is supported by 85 libraries. The number of libraries was determined as previously described. This segment can be found in the following transcript(s): H14624_T20 (SEQ ID NO:7). Table 21 below describes the starting and ending position of this segment on each transcript.

[1138] Segment cluster H14624_node_{—}9 (SEQ ID NO:122) according to the present invention is supported by 87 libraries. The number of libraries was determined as previously described. This segment can be found in the following transcript(s): H14624_T20 (SEQ ID NO:7). Table 22 below describes the starting and ending position of this segment on each transcript.

Variant protein alignment to the previously known protein:

Sequence name: /tmp/Upb1SbFkrj/N4PrGQAB2V:Q9HAP5 (SEQ ID NO:1384)

Sequence Documentation:

Alignment of: H14624_P15 (SEQ ID NO:540)×Q9HAP5 (SEQ ID NO:1384) ••

Alignment segment 1/1:

Alignment:

Description for Cluster H53626

[1139] Cluster H53626 features 2 transcript(s) and 20 segment(s) of interest, the names for which are given in Tables 1 and 2, respectively, the sequences themselves are given at the end of the application. The selected protein variants are given in table 3.

[1140] Cluster H53626 can be used as a diagnostic marker according to overexpression of transcripts of this cluster in cancer. Expression of such transcripts in normal tissues is also given according to the previously described methods. The term “number” in the left hand column of the table and the numbers on the y-axis of the figure below refer to weighted expression of ESTs in each category, as “parts per million” (ratio of the expression of ESTs for a particular cluster to the expression of all ESTs in that category, according to parts per million).

[1141] Overall, the following results were obtained as shown with regard to the histograms in FIG. 13 and Table 4. This cluster is overexpressed (at least at a minimum level) in the following pathological conditions: epithelial malignant tumors, a mixture of malignant tumors from different tissues and myosarcoma.

[1142] As noted above, cluster H53626 features 2 transcript(s), which were listed in Table 1 above. A description of each variant protein according to the present invention is now provided.

[1143] Variant protein H53626_PEA_{—}1_P4 (SEQ ID NO:541) according to the present invention has an amino acid sequence as given at the end of the application; it is encoded by transcript(s) H53626_PEA_{—}1_T15 (SEQ ID NO:8). One or more alignments to one or more previously published protein sequences are given at the end of the application. A brief description of the relationship of the variant protein according to the present invention to each such aligned protein is as follows:

Comparison report between H53626_PEA_{—}1_P4 (SEQ ID NO:541) and Q8N441(SEQ ID NO:1385):

[1144] 1. An isolated chimeric polypeptide encoding for H53626_PEA_{—}1_P4 (SEQ ID NO:541), comprising a first amino acid sequence being at least 90% homologous to MTPSPLLLLLLPPLLLGAFPPAAAARGPPKMADKVVPRQVARLGRTVRLQCPVEGDPPP LTMWTKDGRTIHSGWSRFRVLPQGLKVKQVEREDAGVYVCKATNGFGSLSVNYTLVV LDDISPGKESLGPDSSSGGQEDPASQQWARPRFTQPSKMRRRVIARPVGSSVRLKCVAS GHPRPDITWMKDDQALTRPEAAEPRKKKWTLSLKNLRPEDSGKYTCRVSNRAGAINAT YKVDVIQRTRSKPVLTGTHPVNTTVDFGGTTSFQCKVRSDVKPVIQWLKRVEYGAEGR HNSTIDVGGQKFVVLPTGDVWSRPDGSYLNKLLITRARQDDAGMYICLGANTMGYSFR SAFLTVLP corresponding to amino acids 1-357 of Q8N441 (SEQ ID NO:1385), which also corresponds to amino acids 1-357 of H53626_PEA_{—}1_P4 (SEQ ID NO:541), second amino acid sequence being at least 70%, optionally at least 80%, preferably at least 85%, more preferably at least 90% and most preferably at least 95% homologous to a polypeptide having the sequence GARLPRHATPCWCPDPPPGPGVPPTGWGPTLPSRAVLARSSAEGGQPRGTVSTAPGMG LGCSPGLCVGVPLPTSFPLALA (SEQ ID NO:1487) corresponding to amino acids 358-437 of H53626_PEA_{—}1_P4 (SEQ ID NO:541), and a third amino acid sequence being at least 90% homologous to DPKPPGPPVASSSSATSLPWPVVIGIPAGAVFILGTLLLWLCQAQKKPCTPAPAPPLPGH RPPGTARDRSGDKDLPSLAALSAGPGVGLCEEHGSPAAPQHLLGPGPVAGPKLYPKLY TDIHTHTHTHSHTHSHVEGKVHQHIHYQC corresponding to amino acids 358-504 of Q8N441 (SEQ ID NO:1385), which also corresponds to amino acids 438-584 of H53626_PEA_{—}1_P4 (SEQ ID NO:541), wherein said first, second and third amino acid sequences are contiguous and in a sequential order.

[1145] 2. An isolated polypeptide encoding for an edge portion of H53626_PEA_{—}1_P4 (SEQ ID NO:541), comprising an amino acid sequence being at least 70%, optionally at least about 80%, preferably at least about 85%, more preferably at least about 90% and most preferably at least about 95% homologous to the sequence encoding for GARLPRHATPCWCPDPPPGPGVPPTGWGPTLPSRAVLARSSAEGGQPRGTVSTAPGMG LGCSPGLCVGVPLPTSFPLALA (SEQ ID NO:1487), corresponding to H53626_PEA_{—}1_P4 (SEQ ID NO:541).

[1146] The location of the variant protein was determined according to results from a number of different software programs and analyses, including analyses from SignalP and other specialized programs. The variant protein is believed to be located as follows with regard to the cell: membrane. The protein localization is believed to be membrane because although both signal-peptide prediction programs agree that this protein has a signal peptide, both trans-membrane region prediction programs predict that this protein has a trans-membrane region downstream of this signal peptide.

[1147] Variant protein H53626_PEA_{—}1_P4 (SEQ ID NO:541) also has the following non-silent SNPs (Single Nucleotide Polymorphisms) as listed in Table 6, (given according to their position(s) on the amino acid sequence, with the alternative amino acid(s) listed; the last column indicates whether the SNP is known or not; the presence of known SNPs in variant protein H53626_PEA_{—}1_P4 (SEQ ID NO:541) sequence provides support for the deduced sequence of this variant protein according to the present invention).

[1148] Variant protein H53626_PEA_{—}1_P4 (SEQ ID NO:541) is encoded by the following transcript(s): H53626_PEA_{—}1_T15 (SEQ ID NO:8), for which the sequence(s) is/are given at the end of the application. The coding portion of transcript H53626_PEA_{—}1_T15 (SEQ ID NO:8) is shown in bold; this coding portion starts at position 17 and ends at position 1768. The transcript also has the following SNPs as listed in Table 7 (given according to their position on the nucleotide sequence, with the alternative nucleic acid listed; the last column indicates whether the SNP is known or not; the presence of known SNPs in variant protein H53626_PEA_{—}1_P4 (SEQ ID NO:541) sequence provides support for the deduced sequence of this variant protein according to the present invention).

[1149] Variant protein H53626_PEA_{—}1_P5 (SEQ ID NO:542) according to the present invention has an amino acid sequence as given at the end of the application; it is encoded by transcript(s) H53626_PEA_{—}1_T16 (SEQ ID NO:9). One or more alignments to one or more previously published protein sequences are given at the end of the application. A brief description of the relationship of the variant protein according to the present invention to each such aligned protein is as follows:

[1150] Comparison report between H53626_PEA_{—}1_P5 (SEQ ID NO:542) and Q9H4D7(SEQ ID NO:1386):

[1151] 1. An isolated chimeric polypeptide encoding for H53626_PEA_{—}1_P5 (SEQ ID NO:542), comprising a first amino acid sequence being at least 90% homologous to MTPSPLLLLLLPPLLLGAFPPAAAARGPPKMADKVVPRQVARLGRTVRLQCPVEGDPPP LTMWTKDGRTIHSGWSRFRVLPQGLKVKQVEREDAGVYVCKATNGFGSLSVNYTLVV LDDISPGKESLGPDSSSGGQEDPASQQWARPRFTQPSKMRRRVIARPVGSSVRLKCVAS GHPRPDITWMKDDQALTRPEAAEPRKKKWTLSLKNLRPEDSGKYTCRVSNRAGAINAT YKVDVIQRTRSKPVLTGTHPVNTTVDFGGTTSFQCK corresponding to amino acids 1-269 of Q9H4D7 (SEQ ID NO:1386), which also corresponds to amino acids 1-269 of H53626_PEA_{—}1_P5 (SEQ ID NO:542), and a second amino acid sequence being at least 70%, optionally at least 80%, preferably at least 85%, more preferably at least 90% and most preferably at least 95% homologous to a polypeptide having the sequence TQNRQGHLWPPRPRPLACRGPWSSASQPALSSSWAPCSCGFARPRRSRAPPRLPLPCLG TARRGRPATAAETRTFPRWPPSALALVWGCVRSMGLRQPPSTYWAQAQLLALSCTPNS TQTSTHTHTHTLTHTHTWRARSTSTSTISARRHRICSGHGGAGQTGRLGGWRTELQTKA GDPWRGGMASTPGSLCVRHSPWTHTHRHTHYLDACMHTHARTRAP (SEQ ID NO:1488) corresponding to amino acids 270-490 of H53626_PEA_{—}1_P5 (SEQ ID NO:542), wherein said first and second amino acid sequences are contiguous and in a sequential order.

[1152] 2. An isolated polypeptide encoding for a tail of H53626_PEA_{—}1_P5 (SEQ ID NO:542), comprising a polypeptide being at least 70%, optionally at least about 80%, preferably at least about 85%, more preferably at least about 90% and most preferably at least about 95% homologous to the sequence TQNRQGHLWPPRPRPLACRGPWSSASQPALSSSWAPCSCGFARPRRSRAPPRLPLPCLG TARRGRPATAAETRTFPRWPPSALALVWGCVRSMGLRQPPSTYWAQAQLLALSCTPNS TQTSTHTHTHTLTHTHTWRARSTSTSTISARRHRICSGHGGAGQTGRLGGWRTELQTKA GDPWRGGMASTPGSLCVRHSPWTHTHRHTHYLDACMHTHARTRAP (SEQ ID NO:1488) in H53626_PEA_{—}1_P5 (SEQ ID NO:542).

[1153] Comparison report between H53626_PEA_{—}1_P5 (SEQ ID NO:542) and Q8N441(SEQ ID NO:1385):

[1154] 1. An isolated chimeric polypeptide encoding for H53626_PEA_{—}1_P5 (SEQ ID NO:542), comprising a first amino acid sequence being at least 90% homologous to MTPSPLLLLLLPPLLLGAFPPAAAARGPPKMADKVVPRQVARLGRTVRLQCPVEGDPPP LTMWTKDGRTIHSGWSRFRVLPQGLKVKQVEREDAGVYVCKATNGFGSLSVNYTLVV LDDISPGKESLGPDSSSGGQEDPASQQWARPRFTQPSKMRRRVIARPVGSSVRLKCVAS GHPRPDITWMKDDQALTRPEAAEPRKKKWTLSLKNLRPEDSGKYTCRVSNRAGAINAT YKVDVIQRTRSKPVLTGTHPVNTTVDFGGTTSFQCK corresponding to amino acids 1-269 of Q8N441 (SEQ ID NO:1385), which also corresponds to amino acids 1-269 of H53626_PEA_{—}1_P5 (SEQ ID NO:542), and a second amino acid sequence being at least 70%, optionally at least 80%, preferably at least 85%, more preferably at least 90% and most preferably at least 95% homologous to a polypeptide having the sequence TQNRQGHLWPPRPRPLACRGPWSSASQPALSSSWAPCSCGFARPRRSRAPPRLPLPCLG TARRGRPATAAETRTFPRWPPSALALVWGCVRSMGLRQPPSTYWAQAQLLALSCTPNS TQTSTHTHTHTLTHTHTWRARSTSTSTISARRHRICSGHGGAGQTGRLGGWRTELQTKA GDPWRGGMASTPGSLCVRHSPWTHTHRHTHYLDACMHTHARTRAP (SEQ ID NO:1488) corresponding to amino acids 270-490 of H53626_PEA_{—}1_P5 (SEQ ID NO:542), wherein said first and second amino acid sequences are contiguous and in a sequential order.

[1155] 2. An isolated polypeptide encoding for a tail of H53626_PEA_{—}1_P5 (SEQ ID NO:542), comprising a polypeptide being at least 70%, optionally at least about 80%, preferably at least about 85%, more preferably at least about 90% and most preferably at least about 95% homologous to the sequence TQNRQGHLWPPRPRPLACRGPWSSASQPALSSSWAPCSCGFARPRRSRAPPRLPLPCLG TARRGRPATAAETRTFPRWPPSALALVWGCVRSMGLRQPPSTYWAQAQLLALSCTPNS TQTSTHTHTHTLTHTHTWRARSTSTSTISARRHRICSGHGGAGQTGRLGGWRTELQTKA GDPWRGGMASTPGSLCVRHSPWTHTHRHTHYLDACMHTHARTRAP (SEQ ID NO:1488) in H53626_PEA_{—}1_P5 (SEQ ID NO:542).

[1156] The location of the variant protein was determined according to results from a number of different software programs and analyses, including analyses from SignalP and other specialized programs. The variant protein is believed to be located as follows with regard to the cell: secreted. The protein localization is believed to be secreted because both signal-peptide prediction programs predict that this protein has a signal peptide, and neither trans-membrane region prediction program predicts that this protein has a trans-membrane region.

[1157] Variant protein H53626_PEA_{—}1_P5 (SEQ ID NO:542) also has the following non-silent SNPs (Single Nucleotide Polymorphisms) as listed in Table 8, (given according to their position(s) on the amino acid sequence, with the alternative amino acid(s) listed; the last column indicates whether the SNP is known or not; the presence of known SNPs in variant protein H53626_PEA_{—}1_P5 (SEQ ID NO:542) sequence provides support for the deduced sequence of this variant protein according to the present invention).

[1158] Variant protein H53626_PEA_{—}1_P5 (SEQ ID NO:542) is encoded by the following transcript(s): H53626_PEA_{—}1_T16 (SEQ ID NO:9), for which the sequence(s) is/are given at the end of the application. The coding portion of transcript H53626_PEA_{—}1_T16 (SEQ ID NO:0) is shown in bold; this coding portion starts at position 17 and ends at position 1486. The transcript also has the following SNPs as listed in Table 9 (given according to their position on the nucleotide sequence, with the alternative nucleic acid listed; the last column indicates whether the SNP is known or not; the presence of known SNPs in variant protein H53626_PEA_{—}1_P5 (SEQ ID NO:542) sequence provides support for the deduced sequence of this variant protein according to the present invention).

[1159] As noted above, cluster H53626 features 20 segment(s), which were listed in Table 2 above and for which the sequence(s) are given at the end of the application. These segment(s) are portions of nucleic acid sequence(s) which are described herein separately because they are of particular interest. A description of each segment according to the present invention is now provided.

[1160] Segment cluster H53626_PEA_{—}1_node_{—}15 (SEQ ID NO:123) according to the present invention is supported by 25 libraries. The number of libraries was determined as previously described. This segment can be found in the following transcript(s): H53626_PEA_{—}1_T15 (SEQ ID NO:8) and H53626_PEA_{—}1_T16 (SEQ ID NO:9). Table 10 below describes the starting and ending position of this segment on each transcript.

[1161] Segment cluster H53626_PEA_{—}1_node_{—}22 (SEQ ID NO:124) according to the present invention is supported by 42 libraries. The number of libraries was determined as previously described. This segment can be found in the following transcript(s): H53626_PEA_{—}1_T15 (SEQ ID NO:8) and H53626_PEA_{—}1_T16 (SEQ ID NO:9). Table 11 below describes the starting and ending position of this segment on each transcript.

[1162] Segment cluster H53626_PEA_{—}1_node_{—}25 (SEQ ID NO:125) according to the present invention is supported by 41 libraries. The number of libraries was determined as previously described. This segment can be found in the following transcript(s): H53626_PEA_{—}1_T15 (SEQ ID NO:8). Table 12 below describes the starting and ending position of this segment on each transcript.

[1163] Segment cluster H53626_PEA_{—}1_node_{—}26 (SEQ ID NO:126) according to the present invention is supported by 5 libraries. The number of libraries was determined as previously described. This segment can be found in the following transcript(s): H53626_PEA_{—}1_T15 (SEQ ID NO:8). Table 14 below describes the starting and ending position of this segment on each transcript.

[1164] Microarray (chip) data is also available for this segment as follows. As described above with regard to the cluster itself, various oligonucleotides were tested for being differentially expressed in various disease conditions, particularly cancer. The following oligonucleotides (related to colon cancer) were found to hit this segment, shown in Table 15.

[1165] Segment cluster H53626_PEA_{—}1_node_{—}27 (SEQ ID NO:127) according to the present invention is supported by 106 libraries. The number of libraries was determined as previously described. This segment can be found in the following transcript(s): H53626_PEA_{—}1_T15 (SEQ ID NO:8) and H53626_PEA_{—}1_T16 (SEQ ID NO:9). Table 16 below describes the starting and ending position of this segment on each transcript.

[1166] Segment cluster H53626_PEA_{—}1_node_{—}34 (SEQ ID NO:128) according to the present invention is supported by 121 libraries. The number of libraries was determined as previously described. This segment can be found in the following transcript(s): H53626_PEA_{—}1_T15 (SEQ ID NO:8) and H53626_PEA_{—}1_T16 (SEQ ID NO:9). Table 17 below describes the starting and ending position of this segment on each transcript.

[1167] Segment cluster H53626_PEA_{—}1_node_{—}35 (SEQ ID NO:129) according to the present invention is supported by 85 libraries. The number of libraries was determined as previously described. This segment can be found in the following transcript(s): H53626_PEA_{—}1_T15 (SEQ ID NO:8) and H53626_PEA_{—}1_T16 (SEQ ID NO:9). Table 18 below describes the starting and ending position of this segment on each transcript.

[1168] Segment cluster H53626_PEA_{—}1_node_{—}36 (SEQ ID NO:130) according to the present invention is supported by 69 libraries. The number of libraries was determined as previously described. This segment can be found in the following transcript(s): H53626_PEA_{—}1_T15 (SEQ ID NO:8) and H53626_PEA_{—}1_T16 (SEQ ID NO:9). Table 19 below describes the starting and ending position of this segment on each transcript.

[1169] According to an optional embodiment of the present invention, short segments related to the above cluster are also provided. These segments are up to about 120 bp in length, and so are included in a separate description.

[1170] Segment cluster H53626_PEA_{—}1_node_{—}11 (SEQ ID NO:131) according to the present invention is supported by 12 libraries. The number of libraries was determined as previously described. This segment can be found in the following transcript(s): H53626_PEA_{—}1_T15 (SEQ ID NO:8) and H53626_PEA_{—}1_T16 (SEQ ID NO:9). Table 20 below describes the starting and ending position of this segment on each transcript.

[1171] Segment cluster H53626_PEA_{—}1_node_{—}12 (SEQ ID NO:132) according to the present invention is supported by 11 libraries. The number of libraries was determined as previously described. This segment can be found in the following transcript(s): H53626_PEA_{—}1_T15 (SEQ ID NO:8) and H53626_PEA_{—}1_T16 (SEQ ID NO:9). Table 21 below describes the starting and ending position of this segment on each transcript.

[1172] Segment cluster H53626_PEA_{—}1_node_{—}16 (SEQ ID NO:133) according to the present invention can be found in the following transcript(s): H53626_PEA_{—}1_T15 (SEQ ID NO:8) and H53626_PEA_{—}1_T16 (SEQ ID NO:9). Table 22 below describes the starting and ending position of this segment on each transcript.

[1173] Segment cluster H53626_PEA_{—}1_node_{—}19 (SEQ ID NO:134) according to the present invention is supported by 25 libraries. The number of libraries was determined as previously described. This segment can be found in the following transcript(s): H53626_PEA_{—}1_T15 (SEQ ID NO:8) and H53626_PEA_{—}1_T16 (SEQ ID NO:9). Table 23 below describes the starting and ending position of this segment on each transcript.

[1174] Segment cluster H53626_PEA_{—}1_node_{—}20 (SEQ ID NO:135) according to the present invention is supported by 27 libraries. The number of libraries was determined as previously described. This segment can be found in the following transcript(s): H53626_PEA_{—}1_T15 (SEQ ID NO:8) and H53626_PEA_{—}1_T16 (SEQ ID NO:9). Table 24 below describes the starting and ending position of this segment on each transcript.

[1175] Segment cluster H53626_PEA_{—}1_node_{—}24 (SEQ ID NO:136) according to the present invention is supported by 34 libraries. The number of libraries was determined as previously described. This segment can be found in the following transcript(s): H53626_PEA_{—}1_T15 (SEQ ID NO:8) and H53626_PEA_{—}1_T16 (SEQ ID NO:9). Table 25 below describes the starting and ending position of this segment on each transcript.

[1176] Segment cluster H53626_PEA_{—}1_node_{—}28 (SEQ ID NO:137) according to the present invention is supported by 66 libraries. The number of libraries was determined as previously described. This segment can be found in the following transcript(s): H53626_PEA_{—}1_T15 (SEQ ID NO:8) and H53626_PEA_{—}1_T16 (SEQ ID NO:9). Table 26 below describes the starting and ending position of this segment on each transcript.

[1177] Segment cluster H53626_PEA_{—}1_node_{—}29 (SEQ ID NO:138) according to the present invention is supported by 73 libraries. The number of libraries was determined as previously described. This segment can be found in the following transcript(s): H53626_PEA_{—}1_T15 (SEQ ID NO:8) and H53626_PEA_{—}1_T16 (SEQ ID NO:9). Table 27 below describes the starting and ending position of this segment on each transcript.

[1178] Segment cluster H53626_PEA_{—}1_node_{—}30 (SEQ ID NO:139) according to the present invention is supported by 71 libraries. The number of libraries was determined as previously described. This segment can be found in the following transcript(s): H53626_PEA_{—}1_T15 (SEQ ID NO:8) and H53626_PEA_{—}1_T16 (SEQ ID NO:9). Table 28 below describes the starting and ending position of this segment on each transcript.

[1179] Segment cluster H53626_PEA_{—}1_node_{—}31 (SEQ ID NO:140) according to the present invention is supported by 67 libraries. The number of libraries was determined as previously described. This segment can be found in the following transcript(s): H53626_PEA_{—}1_T15 (SEQ ID NO:8) and H53626_PEA_{—}1_T16 (SEQ ID NO:9). Table 29 below describes the starting and ending position of this segment on each transcript.

[1180] Segment cluster H53626_PEA_{—}1_node_{—}32 (SEQ ID NO:141) according to the present invention is supported by 65 libraries. The number of libraries was determined as previously described. This segment can be found in the following transcript(s): H53626_PEA_{—}1_T15 (SEQ ID NO:8) and H53626_PEA_{—}1_T16 (SEQ ID NO:9). Table 30 below describes the starting and ending position of this segment on each transcript.

[1181] Segment cluster H53626_PEA_{—}1_node_{—}33 (SEQ ID NO:142) according to the present invention can be found in the following transcript(s): H53626_PEA_{—}1_T15 (SEQ ID NO:8) and H53626_PEA_{—}1_T16 (SEQ ID NO:9). Table 31 below describes the starting and ending position of this segment on each transcript.

Expression of Homo sapiens fibroblast growth factor receptor-like 1 (FGFRL1) H53626 transcripts, which are detectable by amplicon as depicted in sequence name H53626 junc24-27F1R3 (SEQ ID NO:1285) in normal and cancerous colon tissues.

[1182] Expression of Homo sapiens fibroblast growth factor receptor-like 1 (FGFRL1) transcripts detectable by or according to junc24-27, H53626 junc24-27F1R3 amplicon (SEQ ID NO:1285) and H53626 junc24-27F1 (SEQ ID NO:1283) and H53626 junc24-27R3 (SEQ ID NO:1284) primers was measured by real time PCR. In parallel the expression of four housekeeping genes—PBGD (GenBank Accession No. BC019323 (SEQ ID NO:1576); amplicon—PBGD-amplicon, SEQ ID NO:531), HPRT1 (GenBank Accession No. NM_{—}000194 (SEQ ID NO:1577); amplicon—HPRT1-amplicon, SEQ ID NO:612), and G6PD (GenBank Accession No. NM_{—}000402 (SEQ ID NO:1578); G6PD amplicon, SEQ ID NO:615), RPS27A (GenBank Accession No. NM_{—}002954 (SEQ ID NO:1579); RPS27A amplicon, SEQ ID NO:1261), was measured similarly. For each RT sample, the expression of the above amplicon was normalized to the geometric mean of the quantities of the housekeeping genes. The normalized quantity of each RT sample was then divided by the median of the quantities of the normal post-mortem (PM) samples (Sample Nos. 41, 52, 62-67, 69-71, Table 3 above, “Tissue sample in colon cancer testing panel”), to obtain a value of fold up-regulation for each sample relative to median of the normal PM samples.

[1183] FIG. 14 is a histogram showing over expression of the above-indicated Homo sapiens fibroblast growth factor receptor-like 1 (FGFRL1) transcripts in cancerous colon samples relative to the normal samples. As is evident from FIG. 14, the expression of Homo sapiens fibroblast growth factor receptor-like 1 (FGFRL1) transcripts detectable by the above amplicon in cancer samples was significantly higher than in the non-cancerous samples (Sample Nos. 41, 52, 62-67, 69-71 Table 3, “Tissue sample in colon cancer testing panel”). Notably an over-expression of at least 5 fold was found in 13 out of 36 adenocarcinoma samples.

[1184] Primer pairs are also optionally and preferably encompassed within the present invention; for example, for the above experiment, the following primer pair was used as a non-limiting illustrative example only of a suitable primer pair: H53626 junc24-27F1 forward primer (SEQ ID NO:1283); and H53626 junc24-27R3reverse primer (SEQ ID NO:1284).

[1185] The present invention also preferably encompasses any amplicon obtained through the use of any suitable primer pair; for example, for the above experiment, the following amplicon was obtained as a non-limiting illustrative example only of a suitable amplicon: H53626 junc24-27F1R3 (SEQ ID NO:1285).

Expression of Homo sapiens fibroblast growth factor receptor-like 1 (FGFRL1) H53626 transcripts, which are detectable by amplicon as depicted in sequence name H53626 seg25 (SEQ ID NO:1288) in normal and cancerous colon tissues.

[1186] Expression of Homo sapiens fibroblast growth factor receptor-like 1 (FGFRL1) transcripts detectable by or according to seg25, H53626 seg25 amplicon (SEQ ID NO:1288) and H53626 seg25F (SEQ ID NO:1286) and H53626 seg25R (SEQ ID NO:1287) primers was measured by real time PCR. In parallel the expression of four housekeeping genes—PBGD (GenBank Accession No. BC019323 (SEQ ID NO:1576); amplicon—PBGD-amplicon, SEQ ID NO:531), HPRT1 (GenBank Accession No. NM_{—}000194 (SEQ ID NO:1577); amplicon—HPRT1-amplicon, SEQ ID NO:612), G6PD (GenBank Accession No. NM_{—}000402 (SEQ ID NO:1578); G6PD amplicon, SEQ ID NO:615), RPS27A (GenBank Accession No. NM_{—}002954 (SEQ ID NO:1579); RPS27A amplicon, SEQ ID NO:1261), was measured similarly. For each RT sample, the expression of the above amplicon was normalized to the geometric mean of the quantities of the housekeeping genes. The normalized quantity of each RT sample was then divided by the median of the quantities of the normal post-mortem (PM) samples (Sample Nos. 41, 52, 62-67, 69-71, Table 3 above, “Tissue samples in colon cancer testing panel”), to obtain a value of fold up-regulation for each sample relative to median of the normal PM samples.

[1187] FIG. 15 is a histogram showing over expression of the above-indicated Homo sapiens fibroblast growth factor receptor-like 1 (FGFRL1) transcripts in cancerous colon samples relative to the normal samples. As is evident from FIG. 15, the expression of Homo sapiens fibroblast growth factor receptor-like 1 (FGFRL1) transcripts detectable by the above amplicon was higher in a few cancer samples than in the non-cancerous samples (Sample Nos. 41, 52, 62-67, 69-71 Table 3, “Tissue samples in colon cancer testing panel”). Notably an over-expression of at least 5 fold was found in 6 out of 36 adenocarcinoma samples.

[1188] Primer pairs are also optionally and preferably encompassed within the present invention; for example, for the above experiment, the following primer pair was used as a non-limiting illustrative example only of a suitable primer pair: H53626 seg25F forward primer (SEQ ID NO:1286); and H53626 seg25R reverse primer (SEQ ID NO:1287).

[1189] The present invention also preferably encompasses any amplicon obtained through the use of any suitable primer pair; for example, for the above experiment, the following amplicon was obtained as a non-limiting illustrative example only of a suitable amplicon: H53626 seg25 (SEQ ID NO:1288).

[1190] It should be noted that the variant expression pattern was found to be similar to the expression pattern of the wild-type (previously known) transcript. However, in some cases (as for colon cancer) overexpression of the variant (for example H53626_FGF-RL_T16 transcript) seems to be higher than that the of previously known transcript.

[1191] Expression of Homo sapiens fibroblast growth factor receptor-like 1 (FGFRL1) H53626 transcripts, which are detectable by amplicon as depicted in sequence name H53626 seg25 (SEQ ID NO:1288) in different normal tissues.

[1192] Expression of Homo sapiens fibroblast growth factor receptor-like 1 (FGFRL1) transcripts detectable by or according to H53626 seg25 amplicon (SEQ ID NO:1288) and H53626 seg25F (SEQ ID NO:1286) and H53626 seg25R (SEQ ID NO:1287) was measured by real time PCR. In parallel the expression of four housekeeping genes: RPL19 (GenBank Accession No. NM_{—}000981 (SEQ ID NO:1580); RPL19 amplicon, SEQ ID NO:1264), TATA box (GenBank Accession No. NM_{—}003194 (SEQ ID NO:1581); TATA amplicon, SEQ ID NO:1267), UBC (GenBank Accession No. BC000449 (SEQ ID NO:1582); amplicon—Ubiquitin-amplicon) and SDHA (GenBank Accession No. NM_{—}004168 (SEQ ID NO:1583); amplicon—SDHA-amplicon, SEQ ID NO:1273) was measured similarly. For each RT sample, the expression of the above amplicon was normalized to the geometric mean of the quantities of the housekeeping genes. The normalized quantity of each RT sample was then divided by the median of the quantities of the lung samples (Sample Nos. 15-17 Table 2 above, “Tissue samples in normal panel”), to obtain a value of relative expression of each sample relative to median of the lung samples.

[1193] The results are presented in FIG. 71, showing the expression of fibroblast growth factor receptor-like 1 (FGFRL1) transcripts detectable by or according to H53626 seg25 amplicon(s) (SEQ ID NO:1288) and H53626 seg25F (SEQ ID NO:1286) and H53626 seg25R (SEQ ID NO:1287) in different normal tissues.

[1194] Expression of Homo sapiens fibroblast growth factor receptor-like 1 (FGFRL1) H53626 transcripts which are detectable by amplicon as depicted in sequence name H53626 junc24-27F1R3 (SEQ ID NO:1285) in different normal tissues

[1195] Expression of Homo sapiens fibroblast growth factor receptor-like 1 (FGFRL1) transcripts detectable by or according to H53626 junc24-27F1R3 amplicon (SEQ ID NO:1285) and H53626junc24-27F1 (SEQ ID NO:1283) and H53626junc24-27R3 (SEQ ID NO:1284) was measured by real time PCR. In parallel the expression of four housekeeping genes—RPL19 (GenBank Accession No. NM_{—}000981 (SEQ ID NO:1580); RPL19 amplicon, SEQ ID NO:1264), TATA box (GenBank Accession No. NM_{—}003194 (SEQ ID NO:1581); TATA amplicon, SEQ ID NO:1267), UBC (GenBank Accession No. BC000449 (SEQ ID NO:1582); amplicon—Ubiquitin-amplicon) and SDHA (GenBank Accession No. NM_{—}004168 (SEQ ID NO:1583); amplicon—SDHA-amplicon, SEQ ID NO:1273) was measured similarly. For each RT sample, the expression of the above amplicon was normalized to the geometric mean of the quantities of the housekeeping genes. The normalized quantity of each RT sample was then divided by the median of the quantities of the lung samples (Sample Nos. 15-17 Table 2 above, “Tissue samples in normal panel”), to obtain a value of relative expression of each sample relative to median of the lung samples.

[1196] The results are presented in FIG. 72, showing the expression of fibroblast growth factor receptor-like 1 (FGFRL1) transcripts detectable by or according to H53626 seg25 (SEQ ID NO: 1285) amplicon(s) and H53626 seg25F (SEQ ID NO:1283) and H53626 junc24-27F1R3 (SEQ ID NO:1284) in different normal tissues.

Variant protein alignment to the previously known protein:

Sequence name: /tmp/K1Mec2ReKO/eg1EUS2AXY:Q8N441 (SEQ ID NO:1385)

Sequence Documentation:

Alignment of: H53626_PEA_{—}1_P4 (SEQ ID NO:541)×Q8N441 (SEQ ID NO:1385) ••

Alignment segment 1/1:

Alignment:

Sequence name: /tmp/oSUZaRW3WK/oSh3fN5Zt0:Q9H4D7 (SEQ ID NO:1386)

Sequence Documentation:

Alignment of: H53626_PEA_{—}1_P5 (SEQ ID NO:542)×Q9H4D7 (SEQ ID NO:1386) ••

Alignment segment 1/1:

Alignment:

Sequence name: /tmp/oSUZaRW3WK/oSh3fN5Zt0:Q8N441 (SEQ ID NO:1385)

Sequence Documentation:

Alignment of: H53626_PEA_{—}1_P5 (SEQ ID NO:542)×Q8N441 (SEQ ID NO:1385).

Alignment segment 1/1:

Alignment:

Description for Cluster HSENA78

[1197] Cluster HSENA78 features 1 transcript(s) and 7 segment(s) of interest, the names for which are given in Tables 1 and 2, respectively, the sequences themselves are given at the end of the application. The selected protein variants are given in table 3.

[1198] These sequences are variants of the known protein Small inducible cytokine B5 precursor (SwissProt accession identifier SZ05_HUMAN; known also according to the synonyms CXCL5; Epithelial-derived neutrophil activating protein 78; Neutrophil-activating peptide ENA-78), SEQ ID NO: 618, referred to herein as the previously known protein.

[1199] Protein Small inducible cytokine B5 precursor (SEQ ID NO:618) is known or believed to have the following function(s): Involved in neutrophil activation. The sequence for protein Small inducible cytokine B5 precursor is given at the end of the application, as “Small inducible cytokine B5 precursor amino acid sequence”. Protein Small inducible cytokine B5 precursor localization is believed to be Secreted.

[1200] The following GO Annotation(s) apply to the previously known protein. The following annotation(s) were found: chemotaxis; signal transduction; cell-cell signaling; positive control of cell proliferation, which are annotation(s) related to Biological Process; and chemokine, which are annotation(s) related to Molecular Function.

[1201] The GO assignment relies on information from one or more of the SwissProt/TremB1 Protein knowledgebase, available from <http://www.expasy.ch/sprot/>; or Locuslink, available from <http://www.ncbi.nlm.nih.gov/projects/LocusLink/>.

[1202] Cluster HSENA78 can be used as a diagnostic marker according to overexpression of transcripts of this cluster in cancer. Expression of such transcripts in normal tissues is also given according to the previously described methods. The term “number” in the left hand column of the table and the numbers on the y-axis of the figure below refer to weighted expression of ESTs in each category, as “parts per million” (ratio of the expression of ESTs for a particular cluster to the expression of all ESTs in that category, according to parts per million).

[1203] Overall, the following results were obtained as shown with regard to the histograms in FIG. 16 and Table 4. This cluster is overexpressed (at least at a minimum level) in the following pathological conditions: epithelial malignant tumors and lung malignant tumors.

[1204] As noted above, cluster HSENA78 features 1 transcript(s), which were listed in Table 1 above. These transcript(s) encode for protein(s) which are variant(s) of protein Small inducible cytokine B5 precursor (SEQ ID NO:618). A description of each variant protein according to the present invention is now provided.

[1205] Variant protein HSENA78_P2 (SEQ ID NO:543) according to the present invention has an amino acid sequence as given at the end of the application; it is encoded by transcript(s) HSENA78_T5 (SEQ ID NO:10. An alignment is given to the known protein (Small inducible cytokine B5 precursor (SEQ ID NO:618)) at the end of the application. One or more alignments to one or more previously published protein sequences are given at the end of the application. A brief description of the relationship of the variant protein according to the present invention to each such aligned protein is as follows:

[1206] Comparison report between HSENA78_P2 (SEQ ID NO:543) and SZ05_HUMAN (SEQ ID NO:618):

[1207] 1. An isolated chimeric polypeptide encoding for HSENA78_P2 (SEQ ID NO:543) comprising a first amino acid sequence being at least 90% homologous to MSLLSSRAARVPGPSSSLCALLVLLLLLTQPGPIASAGPAAAVLRELRCVCLQTTQGVHP KMISNLQVFAIGPQCSKVEVV corresponding to amino acids 1-81 of SZ05_HUMAN (SEQ ID NO:618), which also corresponds to amino acids 1-81 of HSENA78_P2 (SEQ ID NO:543).

[1208] The location of the variant protein was determined according to results from a number of different software programs and analyses, including analyses from SignalP and other specialized programs. The variant protein is believed to be located as follows with regard to the cell: secreted. The protein localization is believed to be secreted because both signal-peptide prediction programs predict that this protein has a signal peptide, and neither trans-membrane region prediction program predicts that this protein has a trans-membrane region.

[1209] Variant protein HSENA78_P2 (SEQ ID NO:543) also has the following non-silent SNPs (Single Nucleotide Polymorphisms) as listed in Table 6, (given according to their position(s) on the amino acid sequence, with the alternative amino acid(s) listed; the last column indicates whether the SNP is known or not; the presence of known SNPs in variant protein HSENA78_P2 (SEQ ID NO:543) sequence provides support for the deduced sequence of this variant protein according to the present invention).

[1210] Variant protein HSENA78_P2 (SEQ ID NO:543) is encoded by the following transcript(s): HSENA78_T5 (SEQ ID NO:10), for which the sequence(s) is/are given at the end of the application. The coding portion of transcript HSENA78_T5 (SEQ ID NO:10) is shown in bold; this coding portion starts at position 149 and ends at position 391. The transcript also has the following SNPs as listed in Table 7 (given according to their position on the nucleotide sequence, with the alternative nucleic acid listed; the last column indicates whether the SNP is known or not; the presence of known SNPs in variant protein HSENA78_P2 (SEQ ID NO:543) sequence provides support for the deduced sequence of this variant protein according to the present invention).

[1211] As noted above, cluster HSENA78 features 7 segment(s), which were listed in Table 2 above and for which the sequence(s) are given at the end of the application. These segment(s) are portions of nucleic acid sequence(s) which are described herein separately because they are of particular interest. A description of each segment according to the present invention is now provided.

[1212] Segment cluster HSENA78_node_{—}0 (SEQ ID NO:143) according to the present invention is supported by 24 libraries. The number of libraries was determined as previously described. This segment can be found in the following transcript(s): HSENA78_T5 (SEQ ID NO:10) Table 8 below describes the starting and ending position of this segment on each transcript.

[1213] Segment cluster HSENA78_node_{—}2 (SEQ ID NO:144) according to the present invention is supported by 22 libraries. The number of libraries was determined as previously described. This segment can be found in the following transcript(s): HSENA78_T5 (SEQ ID NO:10). Table 9 below describes the starting and ending position of this segment on each transcript.

[1214] Segment cluster HSENA78_node_{—}6 (SEQ ID NO:145) according to the present invention is supported by 68 libraries. The number of libraries was determined as previously described. This segment can be found in the following transcript(s): HSENA78_T5 (SEQ ID NO:10) Table 10 below describes the starting and ending position of this segment on each transcript.

[1215] Segment cluster HSENA78_node_{—}9 (SEQ ID NO:146) according to the present invention is supported by 28 libraries. The number of libraries was determined as previously described. This segment can be found in the following transcript(s): HSENA78_T5 (SEQ ID NO:10). Table 11 below describes the starting and ending position of this segment on each transcript.

[1216] According to an optional embodiment of the present invention, short segments related to the above cluster are also provided. These segments are up to about 120 bp in length, and so are included in a separate description.

[1217] Segment cluster HSENA78_node_{—}3 (SEQ ID NO:147) according to the present invention is supported by 1 libraries. The number of libraries was determined as previously described. This segment can be found in the following transcript(s): HSENA78_T5 (SEQ ID NO:10). Table 12 below describes the starting and ending position of this segment on each transcript.

[1218] Segment cluster HSENA78_node_{—}4 (SEQ ID NO:148) according to the present invention is supported by 17 libraries. The number of libraries was determined as previously described. This segment can be found in the following transcript(s): HSENA78_T5 (SEQ ID NO:10) Table 13 below describes the starting and ending position of this segment on each transcript.

[1219] Segment cluster HSENA78_node_{—}8 (SEQ ID NO:149) according to the present invention can be found in the following transcript(s): HSENA78_T5 (SEQ ID NO:10). Table 14 below describes the starting and ending position of this segment on each transcript.

[1220] Microarray (chip) data is also available for this gene as follows. As described above with regard to the cluster itself, various oligonucleotides were tested for being differentially expressed in various disease conditions, particularly cancer. The following oligonucleotides were found to hit this segment with regard to colon cancer, shown in Table 15.

Variant protein alignment to the previously known protein:

Sequence name: /tmp/5kiQY6M×Wx/pLnTrxsCqk:SZ05_HUMAN (SEQ ID NO:618)

Sequence Documentation:

Alignment of: HSENA78_P2 (SEQ ID NO:543)×SZ05_HUMAN (SEQ ID NO:618) ••

Alignment segment 1/1:

Alignment:

Description for Cluster HUMGROG5

[1221] Cluster HUMGROG5 features 4 transcript(s) and 18 segment(s) of interest, the names for which are given in Tables 1 and 2, respectively, the sequences themselves are given at the end of the application. The selected protein variants are given in table 3.

[1222] These sequences are variants of the known protein Macrophage inflammatory protein-2-beta precursor (SwissProt accession identifier MI2B_HUMAN; known also according to the synonyms MIP2-beta; CXCL3; Growth regulated protein gamma; GRO-gamma), SEQ ID NO: 619, referred to herein as the previously known protein.

[1223] Protein Macrophage inflammatory protein-2-beta precursor (SEQ ID NO:619) is known or believed to have the following function(s): May play a role in inflammation and exert its effects on endothelial cells in an autocrine fashion. The sequence for protein Macrophage inflammatory protein-2-beta precursor is given at the end of the application, as “Macrophage inflammatory protein-2-beta precursor amino acid sequence”. Known polymorphisms for this sequence are as shown in Table 4.

[1224] Protein Macrophage inflammatory protein-2-beta precursor (SEQ ID NO:619) localization is believed to be Secreted.

[1225] The following GO Annotation(s) apply to the previously known protein. The following annotation(s) were found: chemokine, which are annotation(s) related to Molecular Function; and extracellular space, which are annotation(s) related to Cellular Component.

[1226] The GO assignment relies on information from one or more of the SwissProt/TremB1 Protein knowledgebase, available from <http://www.expasy.ch/sprot/>; or Locuslink, available from <http://www.ncbi.nlm.nih.gov/projects/LocusLink/>.

[1227] As noted above, cluster HUMGROG5 features 4 transcript(s), which were listed in Table 1 above. These transcript(s) encode for protein(s) which are variant(s) of protein Macrophage inflammatory protein-2-beta precursor (SEQ ID NO:619). A description of each variant protein according to the present invention is now provided.

[1228] Variant protein HUMGROG5_PEA_{—}1_P2 (SEQ ID NO:544) according to the present invention has an amino acid sequence as given at the end of the application; it is encoded by transcript(s) HUMGROG5_PEA_{—}1_T3 (SEQ ID NO:11). An alignment is given to the known protein (Macrophage inflammatory protein-2-beta precursor (SEQ ID NO:619)) at the end of the application. One or more alignments to one or more previously published protein sequences are given at the end of the application. A brief description of the relationship of the variant protein according to the present invention to each such aligned protein is as follows:

[1229] Comparison report between HUMGROG5_PEA_{—}1_P2 (SEQ ID NO:544) and MI2B_HUMAN (SEQ ID NO:619):

[1230] 1. An isolated chimeric polypeptide encoding for HUMGROG5_PEA_{—}1_P2 (SEQ ID NO:544), comprising a first amino acid sequence being at least 90% homologous to MAHATLSAAPSNPRLLRVALLLLLLVAASRRAAGASVVTELRCQCLQTLQGIHLKNIQS VNVRSPGPHCAQTEV corresponding to amino acids 1-74 of MI2B_HUMAN (SEQ ID NO:619), which also corresponds to amino acids 1-74 of HUMGROG5_PEA_{—}1_P2 (SEQ ID NO:544).

[1231] The location of the variant protein was determined according to results from a number of different software programs and analyses, including analyses from SignalP and other specialized programs. The variant protein is believed to be located as follows with regard to the cell: secreted. The protein localization is believed to be secreted because both signal-peptide prediction programs predict that this protein has a signal peptide, and neither trans-membrane region prediction program predicts that this protein has a trans-membrane region.

[1232] Variant protein HUMGROG5_PEA_{—}1_P2 (SEQ ID NO:544) also has the following non-silent SNPs (Single Nucleotide Polymorphisms) as listed in Table 5, (given according to their position(s) on the amino acid sequence, with the alternative amino acid(s) listed; the last column indicates whether the SNP is known or not; the presence of known SNPs in variant protein HUMGROG5_PEA_{—}1_P2 (SEQ ID NO:544) sequence provides support for the deduced sequence of this variant protein according to the present invention).

[1233] Variant protein HUMGROG5_PEA_{—}1_P2 (SEQ ID NO:544) is encoded by the following transcript(s): HUMGROG5_PEA_{—}1_T3 (SEQ ID NO:11), for which the sequence(s) is/are given at the end of the application. The coding portion of transcript HUMGROG5_PEA_{—}1_T3 (SEQ ID NO:11) is shown in bold; this coding portion starts at position 196 and ends at position 420. The transcript also has the following SNPs as listed in Table 6 (given according to their position on the nucleotide sequence, with the alternative nucleic acid listed; the last column indicates whether the SNP is known or not; the presence of known SNPs in variant protein HUMGROG5_PEA_{—}1_P2 (SEQ ID NO:544) sequence provides support for the deduced sequence of this variant protein according to the present invention).

[1234] Variant protein HUMGROG5_PEA_{—}1_P3 (SEQ ID NO:545) according to the present invention has an amino acid sequence as given at the end of the application; it is encoded by transcript(s) HUMGROG5_PEA_{—}1_T4 (SEQ ID NO:12. An alignment is given to the known protein (Macrophage inflammatory protein-2-beta precursor (SEQ ID NO:619)) at the end of the application. One or more alignments to one or more previously published protein sequences are given at the end of the application. A brief description of the relationship of the variant protein according to the present invention to each such aligned protein is as follows:

[1235] Comparison report between HUMGROG5_PEA_{—}1_P3 (SEQ ID NO:545) and MI2B_HUMAN (SEQ ID NO:619):

[1236] 1. An isolated chimeric polypeptide encoding for HUMGROG5_PEA_{—}1_P3 (SEQ ID NO:545), comprising a first amino acid sequence being at least 90% homologous to MAHATLSAAPSNPRLLRVALLLLLLVAASRRAAGASVVTELRCQCLQTLQGIHLKNIQS VNVRSPGPHCAQTEVIATLKNGKKACLNPASPMVQKIIEKILNK corresponding to amino acids 1-103 of MI2B_HUMAN (SEQ ID NO:619), which also corresponds to amino acids 1-103 of HUMGROG5_PEA_{—}1_P3 (SEQ ID NO:545).

[1237] The location of the variant protein was determined according to results from a number of different software programs and analyses, including analyses from SignalP and other specialized programs. The variant protein is believed to be located as follows with regard to the cell: secreted. The protein localization is believed to be secreted because both signal-peptide prediction programs predict that this protein has a signal peptide, and neither trans-membrane region prediction program predicts that this protein has a trans-membrane region.

[1238] Variant protein HUMGROG5_PEA_{—}1_P3 (SEQ ID NO:545) also has the following non-silent SNPs (Single Nucleotide Polymorphisms) as listed in Table 7, (given according to their position(s) on the amino acid sequence, with the alternative amino acid(s) listed; the last column indicates whether the SNP is known or not; the presence of known SNPs in variant protein HUMGROG5_PEA_{—}1_P3 (SEQ ID NO:545) sequence provides support for the deduced sequence of this variant protein according to the present invention).

[1239] Variant protein HUMGROG5_PEA_{—}1_P3 (SEQ ID NO:545) is encoded by the following transcript(s): HUMGROG5_PEA_{—}1_T4 (SEQ ID NO:12), for which the sequence(s) is/are given at the end of the application. The coding portion of transcript HUMGROG5_PEA_{—}1_T4 (SEQ ID NO:12) is shown in bold; this coding portion starts at position 196 and ends at position 504. The transcript also has the following SNPs as listed in Table 8 (given according to their position on the nucleotide sequence, with the alternative nucleic acid listed; the last column indicates whether the SNP is known or not; the presence of known SNPs in variant protein HUMGROG5_PEA_{—}1_P3 (SEQ ID NO:545) sequence provides support for the deduced sequence of this variant protein according to the present invention).

[1240] Variant protein HUMGROG5_PEA_{—}1_P7 (SEQ ID NO:546) according to the present invention has an amino acid sequence as given at the end of the application; it is encoded by transcript(s) HUMGROG5_PEA_{—}1_T9 (SEQ ID NO:14). An alignment is given to the known protein (Macrophage inflammatory protein-2-beta precursor (SEQ ID NO:619)) at the end of the application. One or more alignments to one or more previously published protein sequences are given at the end of the application. A brief description of the relationship of the variant protein according to the present invention to each such aligned protein is as follows:

[1241] Comparison report between HUMGROG5_PEA_{—}1_P7 (SEQ ID NO:546) and MI2B_HUMAN (SEQ ID NO:619):

[1242] 1. An isolated chimeric polypeptide encoding for HUMGROG5_PEA_{—}1_P7 (SEQ ID NO:546), comprising a first amino acid sequence being at least 90% homologous to MAHATLSAAPSNPRLLRVALLLLLLVAASRRAAGASVVTELRCQCLQTLQGIHLKNIQS VN corresponding to amino acids 1-61 of MI2B_HUMAN (SEQ ID NO:619), which also corresponds to amino acids 1-61 of HUMGROG5_PEA_{—}1_P7 (SEQ ID NO:546), and a second amino acid sequence being at least 70%, optionally at least 80%, preferably at least 85%, more preferably at least 90% and most preferably at least 95% homologous to a polypeptide having the sequence SHTQEWEESLSQPRIPHGSENHRKDTEQGEHQLTGEK (SEQ ID NO:1489) corresponding to amino acids 62-98 of HUMGROG5_PEA_{—}1_P7 (SEQ ID NO:546), wherein said first and second amino acid sequences are contiguous and in a sequential order.

[1243] 2. An isolated polypeptide encoding for a tail of HUMGROG5_PEA_{—}1_P7 (SEQ ID NO:546), comprising a polypeptide being at least 70%, optionally at least about 80%, preferably at least about 85%, more preferably at least about 90% and most preferably at least about 95% homologous to the sequence SHTQEWEESLSQPRIPHGSENHRKDTEQGEHQLTGEK (SEQ ID NO:1489) in HUMGROG5_PEA_{—}1_P7 (SEQ ID NO:546).

[1244] The location of the variant protein was determined according to results from a number of different software programs and analyses, including analyses from SignalP and other specialized programs. The variant protein is believed to be located as follows with regard to the cell: secreted. The protein localization is believed to be secreted because both signal-peptide prediction programs predict that this protein has a signal peptide, and neither trans-membrane region prediction program predicts that this protein has a trans-membrane region.

[1245] Variant protein HUMGROG5_PEA_{—}1_P7 (SEQ ID NO:546) also has the following non-silent SNPs (Single Nucleotide Polymorphisms) as listed in Table 9, (given according to their position(s) on the amino acid sequence, with the alternative amino acid(s) listed; the last column indicates whether the SNP is known or not; the presence of known SNPs in variant protein HUMGROG5_PEA_{—}1_P7 (SEQ ID NO:546) sequence provides support for the deduced sequence of this variant protein according to the present invention).

[1246] Variant protein HUMGROG5_PEA_{—}1_P7 (SEQ ID NO:546) is encoded by the following transcript(s): HUMGROG5_PEA_{—}1_T9 (SEQ ID NO:14), for which the sequence(s) is/are given at the end of the application. The coding portion of transcript HUMGROG5_PEA_{—}1_T9 (SEQ ID NO:14) is shown in bold; this coding portion starts at position 196 and ends at position 489. The transcript also has the following SNPs as listed in Table 10 (given according to their position on the nucleotide sequence, with the alternative nucleic acid listed; the last column indicates whether the SNP is known or not; the presence of known SNPs in variant protein HUMGROG5_PEA_{—}1_P7 (SEQ ID NO:546) sequence provides support for the deduced sequence of this variant protein according to the present invention).

[1247] Variant protein HUMGROG5_PEA_{—}1_P12 (SEQ ID NO:547) according to the present invention has an amino acid sequence as given at the end of the application; it is encoded by transcript(s) HUMGROG5_PEA_{—}1_T6 (SEQ ID NO:13). An alignment is given to the known protein (Macrophage inflammatory protein-2-beta precursor (SEQ ID NO:619)) at the end of the application. One or more alignments to one or more previously published protein sequences are given at the end of the application. A brief description of the relationship of the variant protein according to the present invention to each such aligned protein is as follows:

[1248] Comparison report between HUMGROG5_PEA_{—}1_P12 (SEQ ID NO:547) and MI2B_HUMAN (SEQ ID NO:619):

[1249] 1. An isolated chimeric polypeptide encoding for HUMGROG5_PEA_{—}1_P12 (SEQ ID NO:547), comprising a first amino acid sequence being at least 70%, optionally at least 80%, preferably at least 85%, more preferably at least 90% and most preferably at least 95% homologous to a polypeptide having the sequence MHKKGSPILGSHTARVAGTSPPALPLLAQLPDASAEPHGPRHALRRPQQSPAPAGGAAA PAPGGRQPARSRWVPAPWGPRAGRGWGGRPAPTAPLNQRVYSSL (SEQ ID NO:1490) corresponding to amino acids 1-103 of HUMGROG5_PEA_{—}1_P12 (SEQ ID NO:547), and a second amino acid sequence being at least 90% homologous to GASVVTELRCQCLQTLQGIHLKNIQSVNVRSPGPHCAQTEVIATLKNGKKACLNPASPM VQKIIEKILNKGSTN corresponding to amino acids 34-107 of MI2B_HUMAN (SEQ ID NO:619), which also corresponds to amino acids 104-177 of HUMGROG5_PEA_{—}1_P12 (SEQ ID NO:547), wherein said first and second amino acid sequences are contiguous and in a sequential order.

[1250] 2. An isolated polypeptide encoding for a head of HUMGROG5_PEA_{—}1_P12 (SEQ ID NO:547), comprising a polypeptide being at least 70%, optionally at least about 80%, preferably at least about 85%, more preferably at least about 90% and most preferably at least about 95% homologous to the sequence MHKKGSPILGSHTARVAGTSPPALPLLAQLPDASAEPHGPRHALRRPQQSPAPAGGAAA PAPGGRQPARSRWVPAPWGPRAGRGWGGRPAPTAPLNQRVYSSL (SEQ ID NO:1490) of HUMGROG5_PEA_{—}1_P12 (SEQ ID NO:547).

[1251] The location of the variant protein was determined according to results from a number of different software programs and analyses, including analyses from SignalP and other specialized programs. The variant protein is believed to be located as follows with regard to the cell: secreted. The protein localization is believed to be secreted because one of the two signal-peptide prediction programs (HMM:Signal peptide,NN:NO) predicts that this protein has a signal peptide.

[1252] Variant protein HUMGROG5_PEA_{—}1_P12 (SEQ ID NO:547) also has the following non-silent SNPs (Single Nucleotide Polymorphisms) as listed in Table 11, (given according to their position(s) on the amino acid sequence, with the alternative amino acid(s) listed; the last column indicates whether the SNP is known or not; the presence of known SNPs in variant protein HUMGROG5_PEA_{—}1_P12 (SEQ ID NO:547) sequence provides support for the deduced sequence of this variant protein according to the present invention).

[1253] Variant protein HUMGROG5_PEA_{—}1_P12 (SEQ ID NO:547) is encoded by the following transcript(s): HUMGROG5_PEA_{—}1_T6 (SEQ ID NO:13), for which the sequence(s) is/are given at the end of the application. The coding portion of transcript HUMGROG5_PEA_{—}1_T6 (SEQ ID NO:13) is shown in bold; this coding portion starts at position 84 and ends at position 614. The transcript also has the following SNPs as listed in Table 12 (given according to their position on the nucleotide sequence, with the alternative nucleic acid listed; the last column indicates whether the SNP is known or not; the presence of known SNPs in variant protein HUMGROG5_PEA_{—}1_P12 (SEQ ID NO:547) sequence provides support for the deduced sequence of this variant protein according to the present invention).

[1254] As noted above, cluster HUMGROG5 features 18 segment(s), which were listed in Table 2 above and for which the sequence(s) are given at the end of the application. These segment(s) are portions of nucleic acid sequence(s) which are described herein separately because they are of particular interest. A description of each segment according to the present invention is now provided.

[1255] Segment cluster HUMGROG5_PEA_{—}1_node_{—}18 (SEQ ID NO:150) according to the present invention is supported by 23 libraries. The number of libraries was determined as previously described. This segment can be found in the following transcript(s): HUMGROG5_PEA_{—}1_T3 (SEQ ID NO:11) and HUMGROG5_PEA_{—}1_T4 (SEQ ID NO:12. Table 13 below describes the starting and ending position of this segment on each transcript.

[1256] Microarray (chip) data is also available for this segment as follows. As described above with regard to the cluster itself, various oligonucleotides were tested for being differentially expressed in various disease conditions, particularly cancer. The following oligonucleotides were found to hit this segment with regard to colon cancer, shown in Table 14.

[1257] Segment cluster HUMGROG5_PEA_{—}1_node_{—}19 (SEQ ID NO:151) according to the present invention is supported by 40 libraries. The number of libraries was determined as previously described. This segment can be found in the following transcript(s): HUMGROG5_PEA_{—}1_T3 (SEQ ID NO:11), HUMGROG5_PEA_{—}1_T4 (SEQ ID NO:12) HUMGROG5_PEA_{—}1_T6 (SEQ ID NO:13) and HUMGROG5_PEA_{—}1_T9 (SEQ ID NO:14). Table 15 below describes the starting and ending position of this segment on each transcript.

[1258] Segment cluster HUMGROG5_PEA_{—}1_node_{—}21 (SEQ ID NO:152) according to the present invention is supported by 45 libraries. The number of libraries was determined as previously described. This segment can be found in the following transcript(s): HUMGROG5_PEA_{—}1_T3 (SEQ ID NO:11), HUMGROG5_PEA_{—}1_T4 (SEQ ID NO:12), HUMGROG5_PEA_{—}1_T6 (SEQ ID NO:13) and HUMGROG5_PEA_{—}1_T9 (SEQ ID NO:14). Table 16 below describes the starting and ending position of this segment on each transcript.

[1259] Segment cluster HUMGROG5_PEA_{—}1_node_{—}23 (SEQ ID NO:153) according to the present invention is supported by 60 libraries. The number of libraries was determined as previously described. This segment can be found in the following transcript(s): HUMGROG5_PEA_{—}1_T3 (SEQ ID NO:11), HUMGROG5_PEA_{—}1_T4 (SEQ ID NO:12), HUMGROG5_PEA_{—}1_T6 (SEQ ID NO:13) and HUMGROG5_PEA_{—}1_T9 (SEQ ID NO:14). Table 17 below describes the starting and ending position of this segment on each transcript.

[1260] Segment cluster HUMGROG5_PEA_{—}1_node_{—}6 (SEQ ID NO:154) according to the present invention is supported by 22 libraries. The number of libraries was determined as previously described. This segment can be found in the following transcript(s): HUMGROG5_PEA_{—}1_T3 (SEQ ID NO:11), HUMGROG5_PEA_{—}1_T4 (SEQ ID NO:12), HUMGROG5_PEA_{—}1_T6 (SEQ ID NO:13) and HUMGROG5_PEA_{—}1_T9 (SEQ ID NO:14). Table 18 below describes the starting and ending position of this segment on each transcript.

[1261] According to an optional embodiment of the present invention, short segments related to the above cluster are also provided. These segments are up to about 120 bp in length, and so are included in a separate description.

[1262] Segment cluster HUMGROG5_PEA_{—}1_node_{—}10 (SEQ ID NO:155) according to the present invention can be found in the following transcript(s): HUMGROG5_PEA_{—}1_T3 (SEQ ID NO:11), HUMGROG5_PEA_{—}1_T4 (SEQ ID NO:12), HUMGROG5_PEA_{—}1_T6 (SEQ ID NO:13) and HUMGROG5_PEA_{—}1_T9 (SEQ ID NO:14). Table 19 below describes the starting and ending position of this segment on each transcript.

[1263] Segment cluster HUMGROG5_PEA_{—}1_node_{—}11 (SEQ ID NO:156) according to the present invention is supported by 33 libraries. The number of libraries was determined as previously described. This segment can be found in the following transcript(s): HUMGROG5_PEA_{—}1_T3 (SEQ ID NO:1), HUMGROG5_PEA_{—}1_T4 (SEQ ID NO:12) HUMGROG5_PEA_{—}1_T6 (SEQ ID NO:13) and HUMGROG5_PEA_{—}1_T9 (SEQ ID NO:14). Table 20 below describes the starting and ending position of this segment on each transcript.

[1264] Segment cluster HUMGROG5_PEA_{—}1_node_{—}12 (SEQ ID NO:157) according to the present invention can be found in the following transcript(s): HUMGROG5_PEA_{—}1_T3 (SEQ ID NO:11), HUMGROG5_PEA_{—}1_T4 (SEQ ID NO:12) and HUMGROG5_PEA_{—}1_T6 (SEQ ID NO:13). Table 21 below describes the starting and ending position of this segment on each transcript.

[1265] Segment cluster HUMGROG5_PEA_{—}1_node_{—}13 (SEQ ID NO:158) according to the present invention can be found in the following transcript(s): HUMGROG5_PEA_{—}1_T3 (SEQ ID NO:11), HUMGROG5_PEA_{—}1_T4 (SEQ ID NO:12) and HUMGROG5_PEA_{—}1_T6 (SEQ ID NO:13). Table 22 below describes the starting and ending position of this segment on each transcript.

[1266] Segment cluster HUMGROG5_PEA_{—}1_node_{—}14 (SEQ ID NO:159) according to the present invention is supported by 8 libraries. The number of libraries was determined as previously described. This segment can be found in the following transcript(s): HUMGROG5_PEA_{—}1_T3 (SEQ ID NO:11). Table 23 below describes the starting and ending position of this segment on each transcript.

[1267] Segment cluster HUMGROG5_PEA_{—}1_node_{—}15 (SEQ ID NO:160) according to the present invention is supported by 7 libraries. The number of libraries was determined as previously described. This segment can be found in the following transcript(s): HUMGROG5_PEA_{—}1_T3 (SEQ ID NO:11). Table 24 below describes the starting and ending position of this segment on each transcript.

[1268] Segment cluster HUMGROG5_PEA_{—}1_node_{—}16 (SEQ ID NO:161) according to the present invention is supported by 6 libraries. The number of libraries was determined as previously described. This segment can be found in the following transcript(s): HUMGROG5_PEA_{—}1_T3 (SEQ ID NO:11). Table 25 below describes the starting and ending position of this segment on each transcript.

[1269] Segment cluster HUMGROG5_PEA_{—}1_node_{—}17 (SEQ ID NO:162) according to the present invention is supported by 29 libraries. The number of libraries was determined as previously described. This segment can be found in the following transcript(s): HUMGROG5_PEA_{—}1_T3 (SEQ ID NO:11), HUMGROG5_PEA_{—}1_T4 (SEQ ID NO:12), HUMGROG5_PEA_{—}1_T6 (SEQ ID NO:13) and HUMGROG5_PEA_{—}1_T9 (SEQ ID NO:14). Table 26 below describes the starting and ending position of this segment on each transcript.

[1270] Segment cluster HUMGROG5_PEA_{—}1_node_{—}20 (SEQ ID NO:163) according to the present invention can be found in the following transcript(s): HUMGROG5_PEA_{—}1_T3 (SEQ ID NO:11), HUMGROG5_PEA_{—}1_T4 (SEQ ID NO:12), HUMGROG5_PEA_{—}1_T6 (SEQ ID NO:13) and HUMGROG5_PEA_{—}1_T9 (SEQ ID NO:14). Table 27 below describes the starting and ending position of this segment on each transcript.

[1271] Segment cluster HUMGROG5_PEA_{—}1_node_{—}22 (SEQ ID NO:164) according to the present invention can be found in the following transcript(s): HUMGROG5_PEA_{—}1_T3 (SEQ ID NO:11), HUMGROG5_PEA_{—}1_T4 (SEQ ID NO:12), HUMGROG5_PEA_{—}1_T6 (SEQ ID NO:13) and HUMGROG5_PEA_{—}1_T9 (SEQ ID NO:14). Table 28 below describes the starting and ending position of this segment on each transcript.

[1272] Segment cluster HUMGROG5_PEA_{—}1_node_{—}7 (SEQ ID NO:165) according to the present invention is supported by 23 libraries. The number of libraries was determined as previously described. This segment can be found in the following transcript(s): HUMGROG5_PEA_{—}1_T3 (SEQ ID NO:11), HUMGROG5_PEA_{—}1_T4 (SEQ ID NO:12) HUMGROG5_PEA_{—}1_T6 (SEQ ID NO:13) and HUMGROG5_PEA_{—}1_T9 (SEQ ID NO:14). Table 29 below describes the starting and ending position of this segment on each transcript.

[1273] Segment cluster HUMGROG5_PEA_{—}1_node_{—}8 (SEQ ID NO:166) according to the present invention can be found in the following transcript(s): HUMGROG5_PEA_{—}1_T3 (SEQ ID NO:11), HUMGROG5_PEA_{—}1_T4 (SEQ ID NO:12), HUMGROG5_PEA_{—}1_T6 (SEQ ID NO:13) and HUMGROG5_PEA_{—}1_T9 (SEQ ID NO:14). Table 30 below describes the starting and ending position of this segment on each transcript.

[1274] Segment cluster HUMGROG5_PEA_{—}1_node_{—}9 (SEQ ID NO:167) according to the present invention is supported by 3 libraries. The number of libraries was determined as previously described. This segment can be found in the following transcript(s): HUMGROG5_PEA_{—}1_T6 (SEQ ID NO:13). Table 31 below describes the starting and ending position of this segment on each transcript.

Variant protein alignment to the previously known protein:

Sequence name: /tmp/2xnO9xcDbu/OFuYQZgnpt:MI2B_HUMAN (SEQ ID NO:619)

Sequence Documentation:

Alignment of: HUMGROG5_PEA_{—}1_P2 (SEQ ID NO:544)×MI2B_HUMAN (SEQ ID NO:619) ••

Alignment segment 1/1:

Alignment:

Sequence name: /tmp/PMlNwtDTrf/oTkbZ2ktxi:MI2B_HUMAN (SEQ ID NO:619)

Sequence Documentation:

Alignment of: HUMGROG5_PEA_{—}1_P3 (SEQ ID NO:545)×MI2B_HUMAN (SEQ ID NO:619) ••

Alignment segment 1/1:

Alignment:

Sequence name: /tmp/H0ryq4X077/kw3t8ORy6X:MI2B_HUMAN (SEQ ID NO:619)

Sequence Documentation:

Alignment of: HUMGROG5_PEA_{—}1_P7 (SEQ ID NO:546)×MI2B_HUMAN (SEQ ID NO:619) ••

Alignment segment 1/1:

Alignment:

Sequence name: /tmp/eJBNVFGEc7/N3fotcYJO7:MI2B_HUMAN (SEQ ID NO:619)

Sequence Documentation:

Alignment of: HUMGROG5_PEA_{—}1_{—P}12 (SEQ ID NO:547)×MI2B_HUMAN (SEQ ID NO:619) ••

Alignment segment 1/1:

Alignment:

Description for Cluster HUMODCA

[1275] Cluster HUMODCA features 1 transcript(s) and 17 segment(s) of interest, the names for which are given in Tables 1 and 2, respectively, the sequences themselves are given at the end of the application. The selected protein variants are given in table 3.

[1276] These sequences are variants of the known protein Ornithine decarboxylase (SwissProt accession identifier DCOR_HUMAN; known also according to the synonyms EC 4.1.1.17; ODC), SEQ ID NO: 620, referred to herein as the previously known protein.

[1277] Protein Ornithine decarboxylase (SEQ ID NO:620) is known or believed to have the following function(s): Polyamine biosynthesis; first (rate-limiting) step. The sequence for protein Ornithine decarboxylase is given at the end of the application, as “Ornithine decarboxylase amino acid sequence”. Known polymorphisms for this sequence are as shown in Table 4.

[1278] The following GO Annotation(s) apply to the previously known protein. The following annotation(s) were found: polyamine biosynthesis, which are annotation(s) related to Biological Process; and ornithine decarboxylase; lyase, which are annotation(s) related to Molecular Function.

[1279] The GO assignment relies on information from one or more of the SwissProt/TremB1 Protein knowledgebase, available from <http://www.expasy.ch/sprot/>; or Locuslink, available from <http://www.ncbi.nlm.nih.gov/projects/LocusLink/>.

[1280] Cluster HUMODCA can be used as a diagnostic marker according to overexpression of transcripts of this cluster in cancer. Expression of such transcripts in normal tissues is also given according to the previously described methods. The term “number” in the left hand column of the table and the numbers on the y-axis of the figure below refer to weighted expression of ESTs in each category, as “parts per million” (ratio of the expression of ESTs for a particular cluster to the expression of all ESTs in that category, according to parts per million).

[1281] Overall, the following results were obtained as shown with regard to the histograms in FIG. 17 and Table 5. This cluster is overexpressed (at least at a minimum level) in the following pathological conditions: brain malignant tumors, colorectal cancer, epithelial malignant tumors and a mixture of malignant tumors from different tissues.

[1282] As noted above, cluster HUMODCA features 1 transcript(s), which were listed in Table 1 above. These transcript(s) encode for protein(s) which are variant(s) of protein Ornithine decarboxylase (SEQ ID NO:620). A description of each variant protein according to the present invention is now provided.

[1283] Variant protein HUMODCA_P9 (SEQ ID NO:548) according to the present invention has an amino acid sequence as given at the end of the application; it is encoded by transcript(s) HUMODCA_T17 (SEQ ID NO:15). An alignment is given to the known protein (Ornithine decarboxylase (SEQ ID NO:620)) at the end of the application. One or more alignments to one or more previously published protein sequences are given at the end of the application. A brief description of the relationship of the variant protein according to the present invention to each such aligned protein is as follows:

[1284] Comparison report between HUMODCA_P9 (SEQ ID NO:548) and DCOR_HUMAN (SEQ ID NO:620):

[1285] 1. An isolated chimeric polypeptide encoding for HUMODCA_P9 (SEQ ID NO:548) comprising a first amino acid sequence being at least 70%, optionally at least 80%, preferably at least 85%, more preferably at least 90% and most preferably at least 95% homologous to a polypeptide having the sequence MKSLTATSSMKVLLPRTFWTRKLMKFLLL (SEQ ID NO:1491) corresponding to amino acids 1-29 of HUMODCA_P9 (SEQ ID NO:548), and a second amino acid sequence being at least 90% homologous to LVLRIATDDSKAVCRLSVKFGATLRTSRLLLERAKELNIDVVGVSFHVGSGCTDPETFV QAISDARCVFDMGAEVGFSMYLLDIGGGFPGSEDVKLKFEEITGVINPALDKYFPSDSG VRIIAEPGRYYVASAFTLAVNIIAKKIVLKEQTGSDDEDESSEQTFMYYVNDGVYGSFN CILYDHAHVKPLLQKRPKPDEKYYSSSIWGPTCDGLDRIVERCDLPEMHVGDWMLFEN MGAYTVAAASTFNGFQRPTIYYVMSGPAWQLMQQFQNPDFPPEVEEQDASTLPVSCA WESGMKRHRAACASASINV corresponding to amino acids 151-461 of DCOR_HUMAN (SEQ ID NO:620), which also corresponds to amino acids 30-340 of HUMODCA_P9 (SEQ ID NO:548), wherein said first and second amino acid sequences are contiguous and in a sequential order.

[1286] 2. An isolated polypeptide encoding for a head of HUMODCA_P9 (SEQ ID NO:548) comprising a polypeptide being at least 70%, optionally at least about 80%, preferably at least about 85%, more preferably at least about 90% and most preferably at least about 95% homologous to the sequence MKSLTATSSMKVLLPRTFWTRKLMKFLLL (SEQ ID NO:1491) of HUMODCA_P9 (SEQ ID NO:548).

[1287] Comparison report between HUMODCA_P9 (SEQ ID NO:548) and AAA59968(SEQ ID NO:1387):

[1288] 1. An isolated chimeric polypeptide encoding for HUMODCA_P9 (SEQ ID NO:548) comprising a first amino acid sequence being at least 70%, optionally at least 80%, preferably at least 85%, more preferably at least 90% and most preferably at least 95% homologous to a polypeptide having the sequence MKSLTATSSMKVLLPRTFWTRKLMKFLLL (SEQ ID NO:1491) corresponding to amino acids 1-29 of HUMODCA_P9 (SEQ ID NO:548), and a second amino acid sequence being at least 90% homologous to LVLRIATDDSKAVCRLSVKFGATLRTSRLLLERAKELNIDVVGVSFHVGSGCTDPETFV QAISDARCVFDMGAEVGFSMYLLDIGGGFPGSEDVKLKFEEITGVINPALDKYFPSDSG VRIIAEPGRYYVASAFTLAVNIIAKKIVLKEQTGSDDEDESSEQTFMYYVNDGVYGSFN CILYDHAHVKPLLQKRPKPDEKYYSSSIWGPTCDGLDRIVERCDLPEMHVGDWMLFEN MGAYTVAAASTFNGFQRPTIYYVMSGPAWQLMQQFQNPDFPPEVEEQDASTLPVSCA WESGMKRHRAACASASINV corresponding to amino acids 40-350 of AAA59968 (SEQ ID NO:1387), which also corresponds to amino acids 30-340 of HUMODCA_P9 (SEQ ID NO:548), wherein said first and second amino acid sequences are contiguous and in a sequential order.

[1289] 2. An isolated polypeptide encoding for a head of HUMODCA_P9 (SEQ ID NO:548) comprising a polypeptide being at least 70%, optionally at least about 80%, preferably at least about 85%, more preferably at least about 90% and most preferably at least about 95% homologous to the sequence MKSLTATSSMKVLLPRTFWTRKLMKFLLL (SEQ ID NO:1491) of HUMODCA_P9 (SEQ ID NO:548.

[1290] Comparison report between HUMODCA_P9 (SEQ ID NO:548) and AAH14562(SEQ ID NO:1388):

[1291] 1. An isolated chimeric polypeptide encoding for HUMODCA_P9 (SEQ ID NO:548) comprising a first amino acid sequence being at least 70%, optionally at least 80%, preferably at least 85%, more preferably at least 90% and most preferably at least 95% homologous to a polypeptide having the sequence MKSLTATSSMKVLLPRTFWTRKLMKFLLL (SEQ ID NO:1491) corresponding to amino acids 1-29 of HUMODCA_P9 (SEQ ID NO:548), and a second amino acid sequence being at least 90% homologous to LVLRIATDDSKAVCRLSVKFGATLRTSRLLLERAKELNIDVVGVSFHVGSGCTDPETFV QAISDARCVFDMGAEVGFSMYLLDIGGGFPGSEDVKLKFEEITGVINPALDKYFPSDSG VRIIAEPGRYYVASAFTLAVNIIAKKIVLKEQTGSDDEDESSEQTFMYYVNDGVYGSFN CILYDHAHVKPLLQKRPKPDEKYYSSSIWGPTCDGLDRIVERCDLPEMHVGDWMLFEN MGAYTVAAASTFNGFQRPTIYYVMSGPAWQLMQQFQNPDFPPEVEEQDASTLPVSCA WESGMKRHRAACASASINV corresponding to amino acids 86-396 of AAH14562 (SEQ ID NO:1388), which also corresponds to amino acids 30-340 of HUMODCA_P9 (SEQ ID NO:548), wherein said first and second amino acid sequences are contiguous and in a sequential order.

[1292] 2. An isolated polypeptide encoding for a head of HUMODCA_P9 (SEQ ID NO:548), comprising a polypeptide being at least 70%, optionally at least about 80%, preferably at least about 85%, more preferably at least about 90% and most preferably at least about 95% homologous to the sequence MKSLTATSSMKVLLPRTFWTRKLMKFLLL (SEQ ID NO:1491) of HUMODCA_P9 (SEQ ID NO:548).

[1293] The location of the variant protein was determined according to results from a number of different software programs and analyses, including analyses from SignalP and other specialized programs. The variant protein is believed to be located as follows with regard to the cell: secreted. The protein localization is believed to be secreted because both signal-peptide prediction programs predict that this protein has a signal peptide, and neither trans-membrane region prediction program predicts that this protein has a trans-membrane region.

[1294] Variant protein HUMODCA_P9 (SEQ ID NO:548) also has the following non-silent SNPs (Single Nucleotide Polymorphisms) as listed in Table 7, (given according to their position(s) on the amino acid sequence, with the alternative amino acid(s) listed; the last column indicates whether the SNP is known or not; the presence of known SNPs in variant protein HUMODCA_P9 (SEQ ID NO:548) sequence provides support for the deduced sequence of this variant protein according to the present invention).

[1295] Variant protein HUMODCA_P9 (SEQ ID NO:548) is encoded by the following transcript(s): HUMODCA_T17 (SEQ ID NO:15), for which the sequence(s) is/are given at the end of the application. The coding portion of transcript HUMODCA_T17 (SEQ ID NO:15 is shown in bold; this coding portion starts at position 528 and ends at position 1547. The transcript also has the following SNPs as listed in Table 8 (given according to their position on the nucleotide sequence, with the alternative nucleic acid listed; the last column indicates whether the SNP is known or not; the presence of known SNPs in variant protein HUMODCA_P9 (SEQ ID NO:548) sequence provides support for the deduced sequence of this variant protein according to the present invention).

[1296] As noted above, cluster HUMODCA features 17 segment(s), which were listed in Table 2 above and for which the sequence(s) are given at the end of the application. These segment(s) are portions of nucleic acid sequence(s) which are described herein separately because they are of particular interest. A description of each segment according to the present invention is now provided.

[1297] Segment cluster HUMODCA_node_{—}1 (SEQ ID NO:168) according to the present invention is supported by 76 libraries. The number of libraries was determined as previously described. This segment can be found in the following transcript(s): HUMODCA_T17 (SEQ ID NO:15). Table 9 below describes the starting and ending position of this segment on each transcript.

[1298] Segment cluster HUMODCA_node_{—}25 (SEQ ID NO:169) according to the present invention is supported by 190 libraries. The number of libraries was determined as previously described. This segment can be found in the following transcript(s): HUMODCA_T17 (SEQ ID NO:15). Table 10 below describes the starting and ending position of this segment on each transcript.

[1299] Segment cluster HUMODCA_node_{—}32 (SEQ ID NO:170) according to the present invention is supported by 249 libraries. The number of libraries was determined as previously described. This segment can be found in the following transcript(s): HUMODCA_T17 (SEQ ID NO:15). Table 11 below describes the starting and ending position of this segment on each transcript.

[1300] Segment cluster HUMODCA_node_{—}36 (SEQ ID NO:171) according to the present invention is supported by 348 libraries. The number of libraries was determined as previously described. This segment can be found in the following transcript(s): HUMODCA_T17 (SEQ ID NO:15). Table 12 below describes the starting and ending position of this segment on each transcript.

[1301] Segment cluster HUMODCA_node_{—}39 (SEQ ID NO:172) according to the present invention is supported by 297 libraries. The number of libraries was determined as previously described. This segment can be found in the following transcript(s): HUMODCA_T17 (SEQ ID NO:15). Table 13 below describes the starting and ending position of this segment on each transcript.

[1302] Segment cluster HUMODCA_node_{—}41 (SEQ ID NO:173) according to the present invention is supported by 230 libraries. The number of libraries was determined as previously described. This segment can be found in the following transcript(s): HUMODCA_T17 (SEQ ID NO:15). Table 14 below describes the starting and ending position of this segment on each transcript.

[1303] According to an optional embodiment of the present invention, short segments related to the above cluster are also provided. These segments are up to about 120 bp in length, and so are included in a separate description.

[1304] Segment cluster HUMODCA_node_{—}0 (SEQ ID NO:174) according to the present invention is supported by 9 libraries. The number of libraries was determined as previously described. This segment can be found in the following transcript(s): HUMODCA_T17 (SEQ ID NO:15). Table 15 below describes the starting and ending position of this segment on each transcript.

[1305] Segment cluster HUMODCA_node_{—}10 (SEQ ID NO:175) according to the present invention is supported by 107 libraries. The number of libraries was determined as previously described. This segment can be found in the following transcript(s): HUMODCA_T17 (SEQ ID NO:15). Table 16 below describes the starting and ending position of this segment on each transcript.

[1306] Segment cluster HUMODCA_node_{—}12 (SEQ ID NO:176) according to the present invention is supported by 132 libraries. The number of libraries was determined as previously described. This segment can be found in the following transcript(s): HUMODCA_T17 (SEQ ID NO:15). Table 17 below describes the starting and ending position of this segment on each transcript.

[1307] Segment cluster HUMODCA_node_{—}13 (SEQ ID NO:177) according to the present invention is supported by 126 libraries. The number of libraries was determined as previously described. This segment can be found in the following transcript(s): HUMODCA_T17 (SEQ ID NO:15). Table 18 below describes the starting and ending position of this segment on each transcript.

[1308] Segment cluster HUMODCA_node_{—}2 (SEQ ID NO:178) according to the present invention is supported by 81 libraries. The number of libraries was determined as previously described. This segment can be found in the following transcript(s): HUMODCA_T17 (SEQ ID NO:15). Table 19 below describes the starting and ending position of this segment on each transcript.

[1309] Segment cluster HUMODCA_node_{—}27 (SEQ ID NO:179) according to the present invention is supported by 185 libraries. The number of libraries was determined as previously described. This segment can be found in the following transcript(s): HUMODCA_T17 (SEQ ID NO:15). Table 20 below describes the starting and ending position of this segment on each transcript.

[1310] Segment cluster HUMODCA_node_{—}3 (SEQ ID NO:180) according to the present invention is supported by 85 libraries. The number of libraries was determined as previously described. This segment can be found in the following transcript(s): HUMODCA_T17 (SEQ ID NO:15). Table 21 below describes the starting and ending position of this segment on each transcript.

[1311] Segment cluster HUMODCA_node_{—}30 (SEQ ID NO:181) according to the present invention is supported by 196 libraries. The number of libraries was determined as previously described. This segment can be found in the following transcript(s): HUMODCA_T17 (SEQ ID NO:15). Table 22 below describes the starting and ending position of this segment on each transcript.

[1312] Segment cluster HUMODCA_node_{—}34 (SEQ ID NO:182) according to the present invention is supported by 259 libraries. The number of libraries was determined as previously described. This segment can be found in the following transcript(s): HUMODCA_T17 (SEQ ID NO:15). Table 23 below describes the starting and ending position of this segment on each transcript.

[1313] Segment cluster HUMODCA_node_{—}38 (SEQ ID NO:183) according to the present invention is supported by 272 libraries. The number of libraries was determined as previously described. This segment can be found in the following transcript(s): HUMODCA_T17 (SEQ ID NO:15). Table 24 below describes the starting and ending position of this segment on each transcript.

[1314] Segment cluster HUMODCA_node_{—}40 (SEQ ID NO:184) according to the present invention is supported by 239 libraries. The number of libraries was determined as previously described. This segment can be found in the following transcript(s): HUMODCA_T17 (SEQ ID NO:15). Table 25 below describes the starting and ending position of this segment on each transcript.

Variant protein alignment to the previously known protein:

Sequence name: /tmp/y03EwE6i01/dRQ512K6e2:DCOR_HUMAN (SEQ ID NO:620)

Sequence Documentation:

Alignment of: HUMODCA_P9 (SEQ ID NO:548)×DCOR_HUMAN (SEQ ID NO:620) ••

Alignment segment 1/1:

Alignment:

Sequence name: /tmp/y03EwE6i01/dRQ512K6e2:AAA59968 (SEQ ID NO:1387)

Sequence Documentation:

Alignment of: HUMODCA_P9 (SEQ ID NO:548)×AAA59968 (SEQ ID NO:1387) ••

Alignment segment 1/1:

Alignment:

Sequence name: /tmp/y03EwE6i01/dRQ512K6e2:AAH14562 (SEQ ID NO:1388)

Sequence Documentation:

Alignment of: HUMODCA_P9 (SEQ ID NO:548)×AAH14562 (SEQ ID NO:1388) ••

Alignment segment 1/1:

Alignment:

Description for Cluster R00299

[1315] Cluster R00299 features 1 transcript(s) and 12 segment(s) of interest, the names for which are given in Tables 1 and 2, respectively, the sequences themselves are given at the end of the application. The selected protein variants are given in table 3.

[1316] These sequences are variants of the known protein Tescalcin (SwissProt accession identifier TESC_HUMAN; known also according to the synonyms TSC), SEQ ID NO: 621, referred to herein as the previously known protein.

[1317] Protein Tescalcin is known or believed to have the following function: Binds calcium. The sequence for protein Tescalcin (SEQ ID NO:621) is given at the end of the application, as “Tescalcin amino acid sequence”.

[1318] The following GO Annotation(s) apply to the previously known protein. The following annotation(s) were found: calcium binding, which are annotation(s) related to Molecular Function.

[1319] The GO assignment relies on information from one or more of the SwissProt/TremB1 Protein knowledgebase, available from <http://www.expasy.ch/sprot/>; or Locuslink, available from <http://www.ncbi.nlm.nih.gov/projects/LocusLink/>.

[1320] Cluster R00299 can be used as a diagnostic marker according to overexpression of transcripts of this cluster in cancer. Expression of such transcripts in normal tissues is also given according to the previously described methods. The term “number” in the left hand column of the table and the numbers on the y-axis of the figure below refer to weighted expression of ESTs in each category, as “parts per million” (ratio of the expression of ESTs for a particular cluster to the expression of all ESTs in that category, according to parts per million).

[1321] Overall, the following results were obtained as shown with regard to the histograms in FIG. 18 and Table 4. This cluster is overexpressed (at least at a minimum level) in the following pathological conditions: lung malignant tumors.

[1322] As noted above, cluster R00299 features 1 transcript(s), which were listed in Table 1 above. These transcript(s) encode for protein(s) which are variant(s) of protein Tescalcin (SEQ ID NO:621). A description of each variant protein according to the present invention is now provided.

[1323] Variant protein R00299_P3 (SEQ ID NO:549) according to the present invention has an amino acid sequence as given at the end of the application; it is encoded by transcript(s) R00299_T2 (SEQ ID NO:16). An alignment is given to the known protein (Tescalcin (SEQ ID NO:621)) at the end of the application. One or more alignments to one or more previously published protein sequences are given at the end of the application. A brief description of the relationship of the variant protein according to the present invention to each such aligned protein is as follows:

Comparison report between R00299_P3 (SEQ ID NO:549) and Q9NWT9(SEQ ID NO:1389):

[1324] 1. An isolated chimeric polypeptide encoding for R00299_P3 (SEQ ID NO:549) comprising a first amino acid sequence being at least 70%, optionally at least 80%, preferably at least 85%, more preferably at least 90% and most preferably at least 95% homologous to a polypeptide having the sequence MAEKALLCPSSAGLGTWPWVLNSAWPVLPLAVDQGVDWRPRGPV (SEQ ID NO:1492) corresponding to amino acids 1-44 of R00299_P3 (SEQ ID NO:549), second amino acid sequence being at least 90% homologous to SSDQIEQLHRRFKQLSGDQPTIRKENFNNVPDLELNPIRSKIVRAFFDNRNLRKGPSGLA DEINFEDFLTIMSYFRPIDTTMDEEQVELSRKEKLRFLFHMYDSDSDGRITLEEYRNV corresponding to amino acids 74-191 of Q9NWT9 (SEQ ID NO:1389), which also corresponds to amino acids 45-162 of R00299_P3 (SEQ ID NO:549), and a third amino acid sequence being at least 70%, optionally at least 80%, preferably at least 85%, more preferably at least 90% and most preferably at least 95% homologous to a polypeptide having the sequence VEELLSGNPHIEKESARSIADGAMMEAASVCMGQMEPDQVYEGITFEDFLKIWQGIDIE TKMHVRFLNMETMALCH (SEQ ID NO:1493) corresponding to amino acids 163-238 of R00299_P3 (SEQ ID NO:549), wherein said first, second and third amino acid sequences are contiguous and in a sequential order.

[1325] 2. An isolated polypeptide encoding for a head of R00299_P3 (SEQ ID NO:549) comprising a polypeptide being at least 70%, optionally at least about 80%, preferably at least about 85%, more preferably at least about 90% and most preferably at least about 95% homologous to the sequence MAEKALLCPSSAGLGTWPWVLNSAWPVLPLAVDQGVDWRPRGPV (SEQ ID NO:1492) of R00299_P3 (SEQ ID NO:549).

[1326] 3. An isolated polypeptide encoding for a tail of R00299_P3 (SEQ ID NO:549) comprising a polypeptide being at least 70%, optionally at least about 80%, preferably at least about 85%, more preferably at least about 90% and most preferably at least about 95% homologous to the sequence VEELLSGNPHIEKESARSIADGAMMEAASVCMGQMEPDQVYEGITFEDFLKIWQGIDIE TKMHVRFLNMETMALCH (SEQ ID NO:1493) in R00299_P3 (SEQ ID NO:549).

[1327] Comparison report between R00299_P3 (SEQ ID NO:549) and TESC_HUMAN (SEQ ID NO:621):

[1328] 1. An isolated chimeric polypeptide encoding for R00299_P3 (SEQ ID NO:549) comprising a first amino acid sequence being at least 70%, optionally at least 80%, preferably at least 85%, more preferably at least 90% and most preferably at least 95% homologous to a polypeptide having the sequence MAEKALLCPSSAGLGTWPWVLNSAWPVLPLAVDQGVDWRPRGPV (SEQ ID NO:1492) corresponding to amino acids 1-44 of R00299_P3 (SEQ ID NO:549), and a second amino acid sequence being at least 90% homologous to SSDQIEQLHRRFKQLSGDQPTIRKENFNNVPDLELNPIRSKIVRAFFDNRNLRKGPSGLA DEINFEDFLTIMSYFRPIDTTMDEEQVELSRKEKLRFLFHMYDSDSDGRITLEEYRNVVE ELLSGNPHIEKESARSIADGAMMEAASVCMGQMEPDQVYEGITFEDFLKIWQGIDIETK MHVRFLNMETMALCH corresponding to amino acids 21-214 of TESC_HUMAN (SEQ ID NO:621), which also corresponds to amino acids 45-238 of R00299_P3 (SEQ ID NO:549), wherein said first and second amino acid sequences are contiguous and in a sequential order.

[1329] 2. An isolated polypeptide encoding for a head of R00299_P3 (SEQ ID NO:549), comprising a polypeptide being at least 70%, optionally at least about 80%, preferably at least about 85%, more preferably at least about 90% and most preferably at least about 95% homologous to the sequence MAEKALLCPSSAGLGTWPWVLNSAWPVLPLAVDQGVDWRPRGPV (SEQ ID NO:1492) of R00299_P3 (SEQ ID NO:549).

[1330] The location of the variant protein was determined according to results from a number of different software programs and analyses, including analyses from SignalP and other specialized programs. The variant protein is believed to be located as follows with regard to the cell: secreted. The protein localization is believed to be secreted because one of the two signal-peptide prediction programs (HMM:Signal peptide,NN:NO) predicts that this protein has a signal peptide.

[1331] Variant protein R00299_P3 (SEQ ID NO:549) also has the following non-silent SNPs (Single Nucleotide Polymorphisms) as listed in Table 6, (given according to their position(s) on the amino acid sequence, with the alternative amino acid(s) listed; the last column indicates whether the SNP is known or not; the presence of known SNPs in variant protein R00299_P3 (SEQ ID NO:549) sequence provides support for the deduced sequence of this variant protein according to the present invention).

[1332] Variant protein R00299_P3 (SEQ ID NO:549) is encoded by the following transcript(s): R00299_T2 (SEQ ID NO:16), for which the sequence(s) is/are given at the end of the application. The coding portion of transcript R00299_T2 (SEQ ID NO:16) is shown in bold; this coding portion starts at position 142 and ends at position 855. The transcript also has the following SNPs as listed in Table 7 (given according to their position on the nucleotide sequence, with the alternative nucleic acid listed; the last column indicates whether the SNP is known or not; the presence of known SNPs in variant protein R00299_P3 (SEQ ID NO:549) sequence provides support for the deduced sequence of this variant protein according to the present invention).

[1333] As noted above, cluster R00299 features 12 segment(s), which were listed in Table 2 above and for which the sequence(s) are given at the end of the application. These segment(s) are portions of nucleic acid sequence(s) which are described herein separately because they are of particular interest. A description of each segment according to the present invention is now provided.

[1334] Segment cluster R00299_node_{—}2 (SEQ ID NO:185) according to the present invention is supported by 3 libraries. The number of libraries was determined as previously described. This segment can be found in the following transcript(s): R00299_T2 (SEQ ID NO:16). Table 8 below describes the starting and ending position of this segment on each transcript.

[1335] Segment cluster R00299_node_{—}30 (SEQ ID NO:186) according to the present invention is supported by 75 libraries. The number of libraries was determined as previously described. This segment can be found in the following transcript(s): R00299_T2 (SEQ ID NO:16). Table 9 below describes the starting and ending position of this segment on each transcript.

[1336] According to an optional embodiment of the present invention, short segments related to the above cluster are also provided. These segments are up to about 120 bp in length, and so are included in a separate description.

[1337] Segment cluster R00299_node_{—}10 (SEQ ID NO:187) according to the present invention is supported by 46 libraries. The number of libraries was determined as previously described. This segment can be found in the following transcript(s): R00299_T2 (SEQ ID NO:16). Table 10 below describes the starting and ending position of this segment on each transcript.

[1338] Segment cluster R00299_node_{—}14 (SEQ ID NO:188) according to the present invention is supported by 61 libraries. The number of libraries was determined as previously described. This segment can be found in the following transcript(s): R00299_T2 (SEQ ID NO:16). Table 11 below describes the starting and ending position of this segment on each transcript.

[1339] Segment cluster R00299_node_{—}15 (SEQ ID NO:189) according to the present invention can be found in the following transcript(s): R00299_T2 (SEQ ID NO:16). Table 12 below describes the starting and ending position of this segment on each transcript.

[1340] Segment cluster R00299_node_{—}20 (SEQ ID NO:190) according to the present invention is supported by 66 libraries. The number of libraries was determined as previously described. This segment can be found in the following transcript(s): R00299_T2 (SEQ ID NO:16). Table 13 below describes the starting and ending position of this segment on each transcript.

[1341] Segment cluster R00299_node_{—}23 (SEQ ID NO:191) according to the present invention is supported by 71 libraries. The number of libraries was determined as previously described. This segment can be found in the following transcript(s): R00299_T2 (SEQ ID NO:16). Table 14 below describes the starting and ending position of this segment on each transcript.

[1342] Segment cluster R00299_node_{—}25 (SEQ ID NO:192) according to the present invention is supported by 62 libraries. The number of libraries was determined as previously described. This segment can be found in the following transcript(s): R00299_T2 (SEQ ID NO:16). Table 15 below describes the starting and ending position of this segment on each transcript.

[1343] Segment cluster R00299_node_{—}28 (SEQ ID NO:193) according to the present invention can be found in the following transcript(s): R00299_T2 (SEQ ID NO:16). Table 16 below describes the starting and ending position of this segment on each transcript.

[1344] Segment cluster R00299_node_{—}31 (SEQ ID NO:194) according to the present invention is supported by 48 libraries. The number of libraries was determined as previously described. This segment can be found in the following transcript(s): R00299_T2 (SEQ ID NO:16). Table 17 below describes the starting and ending position of this segment on each transcript.

[1345] Segment cluster R00299_node_{—}5 (SEQ ID NO:195) according to the present invention is supported by 45 libraries. The number of libraries was determined as previously described. This segment can be found in the following transcript(s): R00299_T2 (SEQ ID NO:16). Table 18 below describes the starting and ending position of this segment on each transcript.

[1346] Segment cluster R00299_node_{—}9 (SEQ ID NO:196) according to the present invention can be found in the following transcript(s): R00299_T2 (SEQ ID NO:16). Table 19 below describes the starting and ending position of this segment on each transcript.

[1347] Microarray (chip) data is also available for this gene as follows. As described above with regard to the cluster itself, various oligonucleotides were tested for being differentially expressed in various disease conditions, particularly cancer. The following oligonucleotide was found to hit this segment with regard to colon cancer, shown in Table 20.

Variant protein alignment to the previously known protein:

Sequence name: /tmp/OleVDhrKQ0/EjblgLomjM:Q9NWT9 (SEQ ID NO:1389)

Sequence Documentation:

Alignment of: R00299_P3 (SEQ ID NO:549)×Q9NWT9 (SEQ ID NO:1389) ••

Alignment segment 1/1:

Alignment:

Sequence name: /tmp/OleVDhrKQ0/EjblgLomjM:TESC_HUMAN (SEQ ID NO:621)

Sequence Documentation:

Alignment of: R00299_P3 (SEQ ID NO:549)×TESC_HUMAN (SEQ ID NO:621) ••

Alignment segment 1/1:

Alignment:

Description for Cluster Z19178

[1348] Cluster Z19178 features 2 transcript(s) and 15 segment(s) of interest, the names for which are given in Tables 1 and 2, respectively, the sequences themselves are given at the end of the application. The selected protein variants are given in table 3.

[1349] These sequences are variants of the known protein Skeletal muscle LIM-protein 2 (SwissProt accession identifier SLI2_HUMAN; known also according to the synonyms SLIM 2; Four and a half LIM domains protein 3; FHL-3), SEQ ID NO: 622, referred to herein as the previously known protein.

[1350] The sequence for protein Skeletal muscle LIM-protein 2 is given at the end of the application, as “Skeletal muscle LIM-protein 2 amino acid sequence” (SEQ ID NO: 622).

[1351] The following GO Annotation(s) apply to the previously known protein. The following annotation(s) were found: muscle development, which are annotation(s) related to Biological Process.

[1352] The GO assignment relies on information from one or more of the SwissProt/TremB1 Protein knowledgebase, available from <http://www.expasy.ch/sprot/>; or Locuslink, available from <http://www.ncbi.nlm.nih.gov/projects/LocusLink/>.

[1353] As noted above, cluster Z19178 features 2 transcript(s), which were listed in Table 1 above. These transcript(s) encode for protein(s) which are variant(s) of protein Skeletal muscle LIM-protein 2 (SEQ ID NO:622). A description of each variant protein according to the present invention is now provided.

[1354] Variant protein Z19178_PEA_{—}1_P5 (SEQ ID NO:550) according to the present invention has an amino acid sequence as given at the end of the application; it is encoded by transcript(s) Z19178_PEA_{—}1_T5 (SEQ ID NO:17). An alignment is given to the known protein (Skeletal muscle LIM-protein 2 (SEQ ID NO:622)) at the end of the application. One or more alignments to one or more previously published protein sequences are given at the end of the application. A brief description of the relationship of the variant protein according to the present invention to each such aligned protein is as follows:

Comparison report between Z19178_PEA_{—}1_P5 (SEQ ID NO:550) and Q96C98(SEQ ID NO:1390):

[1355] 1. An isolated chimeric polypeptide encoding for Z19178_PEA_{—}1_P5 (SEQ ID NO:550), comprising a first amino acid sequence being at least 70%, optionally at least 80%, preferably at least 85%, more preferably at least 90% and most preferably at least 95% homologous to a polypeptide having the sequence GGGGRADWRPKGRWGRGLAPAAGWGAGVRGPGGAGPRSLPRGGVGAALPLAHTVR LQSAASPAARSAPAWPGPQELFYEDRHFHEGCFRCCRCQRSLADEPFTCQDSELLCNDC YCSAFSSQCSACGETV (SEQ ID NO:1494) corresponding to amino acids 1-130 of Z19178_PEA_{—}1_P5 (SEQ ID NO:550), and a second amino acid sequence being at least 90% homologous to MPGSRKLEYGGQTWHEHCFLCSGCEQPLGSRSFVPDKGAHYCVPCYENKFAPRCARCS KTLTQGGVTYRDQPWHRECLVCTGCQTPLAGQQFTSRDEDPYCVACFGELFAPKCSSC KRPIVGLGGGKYVSFEDRHWHHNCFSCARCSTSLVGQGFVPDGDQVLCQGCSQAGP corresponding to amino acids 1-172 of Q96C98 (SEQ ID NO:1390), which also corresponds to amino acids 131-302 of Z19178_PEA_{—}1_P5 (SEQ ID NO:550), wherein said first and second amino acid sequences are contiguous and in a sequential order.

[1356] 2. An isolated polypeptide encoding for a head of Z19178_PEA_{—}1_P5 (SEQ ID NO:550), comprising a polypeptide being at least 70%, optionally at least about 80%, preferably at least about 85%, more preferably at least about 90% and most preferably at least about 95% homologous to the sequence GGGGRADWRPKGRWGRGLAPAAGWGAGVRGPGGAGPRSLPRGGVGAALPLAHTVR LQSAASPAARSAPAWPGPQELFYEDRHFHEGCFRCCRCQRSLADEPFTCQDSELLCNDC YCSAFSSQCSACGETV (SEQ ID NO:1494) of Z19178_PEA_{—}1_P5 (SEQ ID NO:550).

[1357] Comparison report between Z19178_PEA_{—}1_P5 (SEQ ID NO:550) and Q9BVA2(SEQ ID NO:1391):

[1358] 1. An isolated chimeric polypeptide encoding for Z19178_PEA_{—}1_P5 (SEQ ID NO:550), comprising a first amino acid sequence being at least 70%, optionally at least 80%, preferably at least 85%, more preferably at least 90% and most preferably at least 95% homologous to a polypeptide having the sequence GGGGRADWRPKGRWGRGLAPAAGWGAGVRGPGGAGPRSLPRGGVGAALPLAHTVR LQSAASPAARSAPAWPGPQ corresponding to amino acids 1-74 of Z19178_PEA_{—}1_P5 (SEQ ID NO:550), and a second amino acid sequence being at least 90% homologous to ELFYEDRHFHEGCFRCCRCQRSLADEPFTCQDSELLCNDCYCSAFSSQCSACGETVMPG SRKLEYGGQTWHEHCFLCSGCEQPLGSRSFVPDKGAHYCVPCYENKFAPRCARCSKTL TQGGVTYRDQPWHRECLVCTGCQTPLAGQQFTSRDEDPYCVACFGELFAPKCSSCKRP IVGLGGGKYVSFEDRHWHHNCFSCARCSTSLVGQGFVPDGDQVLCQGCSQAGP corresponding to amino acids 53-280 of Q9BVA2 (SEQ ID NO:1391), which also corresponds to amino acids 75-302 of Z19178_PEA_{—}1_P5 (SEQ ID NO:550), wherein said first and second amino acid sequences are contiguous and in a sequential order.

[1359] 2. An isolated polypeptide encoding for a head of Z19178_PEA_{—}1_P5 (SEQ ID NO:550), comprising a polypeptide being at least 70%, optionally at least about 80%, preferably at least about 85%, more preferably at least about 90% and most preferably at least about 95% homologous to the sequence GGGGRADWRPKGRWGRGLAPAAGWGAGVRGPGGAGPRSLPRGGVGAALPLAHTVR LQSAASPAARSAPAWPGPQ of Z19178_PEA_{—}1_P5 (SEQ ID NO:550).

[1360] The location of the variant protein was determined according to results from a number of different software programs and analyses, including analyses from SignalP and other specialized programs. The variant protein is believed to be located as follows with regard to the cell: secreted. The protein localization is believed to be secreted because one of the two signal-peptide prediction programs (HMM:Signal peptide,NN:NO) predicts that this protein has a signal peptide.

[1361] Variant protein Z19178_PEA_{—}1_P5 (SEQ ID NO:550) also has the following non-silent SNPs (Single Nucleotide Polymorphisms) as listed in Table 4, (given according to their position(s) on the amino acid sequence, with the alternative amino acid(s) listed; the last column indicates whether the SNP is known or not; the presence of known SNPs in variant protein Z19178_PEA_{—}1_P5 (SEQ ID NO:550) sequence provides support for the deduced sequence of this variant protein according to the present invention).

[1362] Variant protein Z19178_PEA_{—}1_P5 (SEQ ID NO:550) is encoded by the following transcript(s): Z19178_PEA_{—}1_T5 (SEQ ID NO:17), for which the sequence(s) is/are given at the end of the application. The coding portion of transcript Z19178_PEA_{—}1_T5 (SEQ ID NO:17) is shown in bold; this coding portion starts at position 1 and ends at position 907. The transcript also has the following SNPs as listed in Table 5 (given according to their position on the nucleotide sequence, with the alternative nucleic acid listed; the last column indicates whether the SNP is known or not; the presence of known SNPs in variant protein Z19178_PEA_{—}1_P5 (SEQ ID NO:550) sequence provides support for the deduced sequence of this variant protein according to the present invention).

[1363] Variant protein Z19178_PEA_{—}1_P6 (SEQ ID NO:551) according to the present invention has an amino acid sequence as given at the end of the application; it is encoded by transcript(s) Z19178_PEA_{—}1_T9 (SEQ ID NO:18). An alignment is given to the known protein (Skeletal muscle LIM-protein 2 (SEQ ID NO:622)) at the end of the application. One or more alignments to one or more previously published protein sequences are given at the end of the application. A brief description of the relationship of the variant protein according to the present invention to each such aligned protein is as follows:

[1364] Comparison report between Z19178_PEA_{—}1_P6 (SEQ ID NO:551) and Q96C98(SEQ ID NO:1390):

[1365] 1. An isolated chimeric polypeptide encoding for Z19178_PEA_{—}1_P6 (SEQ ID NO:551), comprising a first amino acid sequence being at least 70%, optionally at least 80%, preferably at least 85%, more preferably at least 90% and most preferably at least 95% homologous to a polypeptide having the sequence MNPSPARTVSCSAMTATAVRFPRSAPLVGRLSCL (SEQ ID NO:1495) corresponding to amino acids 1-34 of Z19178_PEA_{—}1_P6 (SEQ ID NO:551), and a second amino acid sequence being at least 90% homologous to TLTQGGVTYRDQPWHRECLVCTGCQTPLAGQQFTSRDEDPYCVACFGELFAPKCSSCK RPIVGLGGGKYVSFEDRHWHHNCFSCARCSTSLVGQGFVPDGDQVLCQGCSQAGP corresponding to amino acids 60-172 of Q96C98 (SEQ ID NO:1390), which also corresponds to amino acids 35-147 of Z19178_PEA_{—}1_P6 (SEQ ID NO:551), wherein said first and second amino acid sequences are contiguous and in a sequential order.

[1366] 2. An isolated polypeptide encoding for a head of Z19178_PEA_{—}1_P6 (SEQ ID NO:551), comprising a polypeptide being at least 70%, optionally at least about 80%, preferably at least about 85%, more preferably at least about 90% and most preferably at least about 95% homologous to the sequence MNPSPARTVSCSAMTATAVRFPRSAPLVGRLSCL (SEQ ID NO:1495) of Z19178_PEA_{—}1_P6 (SEQ ID NO:551).

[1367] Comparison report between Z19178_PEA_{—}1_P6 (SEQ ID NO:551) and Q9BVA2 (SEQ ID NO:1391):

[1368] 1. An isolated chimeric polypeptide encoding for Z19178_PEA_{—}1_P6 (SEQ ID NO:551), comprising a first amino acid sequence being at least 70%, optionally at least 80%, preferably at least 85%, more preferably at least 90% and most preferably at least 95% homologous to a polypeptide having the sequence MNPSPARTVSCSAMTATAVRFPRSAPLVGRLSCL (SEQ ID NO:1495) corresponding to amino acids 1-34 of Z19178_PEA_{—}1_P6 (SEQ ID NO:551), and a second amino acid sequence being at least 90% homologous to TLTQGGVTYRDQPWHRECLVCTGCQTPLAGQQFTSRDEDPYCVACFGELFAPKCSSCK RPIVGLGGGKYVSFEDRHWHHNCFSCARCSTSLVGQGFVPDGDQVLCQGCSQAGP corresponding to amino acids 168-280 of Q9BVA2 (SEQ ID NO:1391), which also corresponds to amino acids 35-147 of Z19178_PEA_{—}1_P6 (SEQ ID NO:551), wherein said first and second amino acid sequences are contiguous and in a sequential order.

[1369] 2. An isolated polypeptide encoding for a head of Z19178_PEA_{—}1_P6 (SEQ ID NO:551), comprising a polypeptide being at least 70%, optionally at least about 80%, preferably at least about 85%, more preferably at least about 90% and most preferably at least about 95% homologous to the sequence MNPSPARTVSCSAMTATAVRFPRSAPLVGRLSCL (SEQ ID NO:1495) of Z19178_PEA_{—}1_P6 (SEQ ID NO:551).

[1370] The location of the variant protein was determined according to results from a number of different software programs and analyses, including analyses from SignalP and other specialized programs. The variant protein is believed to be located as follows with regard to the cell: secreted. The protein localization is believed to be secreted because one of the two signal-peptide prediction programs (HMM:Signal peptide,NN:NO) predicts that this protein has a signal peptide.

[1371] Variant protein Z19178_PEA_{—}1_P6 (SEQ ID NO:551) also has the following non-silent SNPs (Single Nucleotide Polymorphisms) as listed in Table 6, (given according to their position(s) on the amino acid sequence, with the alternative amino acid(s) listed; the last column indicates whether the SNP is known or not; the presence of known SNPs in variant protein Z19178_PEA_{—}1_P6 (SEQ ID NO:551) sequence provides support for the deduced sequence of this variant protein according to the present invention).

[1372] Variant protein Z19178_PEA_{—}1_P6 (SEQ ID NO:551) is encoded by the following transcript(s): Z19178_PEA_{—}1_T9 (SEQ ID NO:18, for which the sequence(s) is/are given at the end of the application. The coding portion of transcript Z19178_PEA_{—}1_T9 (SEQ ID NO:18) is shown in bold; this coding portion starts at position 379 and ends at position 819. The transcript also has the following SNPs as listed in Table 7 (given according to their position on the nucleotide sequence, with the alternative nucleic acid listed; the last column indicates whether the SNP is known or not; the presence of known SNPs in variant protein Z19178_PEA_{—}1_P6 (SEQ ID NO:551) sequence provides support for the deduced sequence of this variant protein according to the present invention).

[1373] As noted above, cluster Z19178 features 15 segment(s), which were listed in Table 2 above and for which the sequence(s) are given at the end of the application. These segment(s) are portions of nucleic acid sequence(s) which are described herein separately because they are of particular interest. A description of each segment according to the present invention is now provided.

[1374] Segment cluster Z19178_PEA_{—}1_node_{—}15 (SEQ ID NO:197) according to the present invention is supported by 50 libraries. The number of libraries was determined as previously described. This segment can be found in the following transcript(s): Z19178_PEA_{—}1_T5 (SEQ ID NO:17). Table 8 below describes the starting and ending position of this segment on each transcript.

[1375] Segment cluster Z19178_PEA_{—}1_node_{—}17 (SEQ ID NO:198) according to the present invention is supported by 50 libraries. The number of libraries was determined as previously described. This segment can be found in the following transcript(s): Z19178_PEA_{—}1_T5 (SEQ ID NO:17) and Z19178_PEA_{—}1_T9 (SEQ ID NO:18). Table 9 below describes the starting and ending position of this segment on each transcript.

[1376] Segment cluster Z19178_PEA_{—}1_node_{—}2 (SEQ ID NO:199) according to the present invention is supported by 43 libraries. The number of libraries was determined as previously described. This segment can be found in the following transcript(s): Z19178_PEA_{—}1_T5 (SEQ ID NO:17) and Z19178_PEA_{—}1_T9 (SEQ ID NO:18). Table 10 below describes the starting and ending position of this segment on each transcript.

[1377] Segment cluster Z19178_PEA_{—}1_node_{—}22 (SEQ ID NO:200) according to the present invention is supported by 61 libraries. The number of libraries was determined as previously described. This segment can be found in the following transcript(s): Z19178_PEA_{—}1_T5 (SEQ ID NO:17) and Z19178_PEA_{—}1_T9 (SEQ ID NO:18). Table 11 below describes the starting and ending position of this segment on each transcript.

[1378] Segment cluster Z19178_PEA_{—}1_node_{—}23 (SEQ ID NO:201) according to the present invention is supported by 81 libraries. The number of libraries was determined as previously described. This segment can be found in the following transcript(s): Z19178_PEA_{—}1_T5 (SEQ ID NO:17) and Z19178_PEA_{—}1_T9 (SEQ ID NO:18). Table 12 below describes the starting and ending position of this segment on each transcript.

[1379] Segment cluster Z19178_PEA_{—}1_node_{—}24 (SEQ ID NO:202) according to the present invention is supported by 58 libraries. The number of libraries was determined as previously described. This segment can be found in the following transcript(s): Z19178_PEA_{—}1_T5 (SEQ ID NO:17) and Z19178_PEA_{—}1_T9 (SEQ ID NO:18). Table 13 below describes the starting and ending position of this segment on each transcript.

[1380] According to an optional embodiment of the present invention, short segments related to the above cluster are also provided. These segments are up to about 120 bp in length, and so are included in a separate description.

[1381] Segment cluster Z19178_PEA_{—}1_node_{—}10 (SEQ ID NO:203) according to the present invention is supported by 60 libraries. The number of libraries was determined as previously described. This segment can be found in the following transcript(s): Z19178_PEA_{—}1_T5 (SEQ ID NO:17) and Z19178_PEA_{—}1_T9 (SEQ ID NO:18). Table 14 below describes the starting and ending position of this segment on each transcript.

[1382] Segment cluster Z19178_PEA_{—}1_node_{—}11 (SEQ ID NO:204) according to the present invention is supported by 56 libraries. The number of libraries was determined as previously described. This segment can be found in the following transcript(s): Z19178_PEA_{—}1_T5 (SEQ ID NO:17) and Z19178_PEA_{—}1_T9 (SEQ ID NO:18). Table 15 below describes the starting and ending position of this segment on each transcript.

[1383] Segment cluster Z19178_PEA_{—}1_node_{—}14 (SEQ ID NO:205) according to the present invention is supported by 53 libraries. The number of libraries was determined as previously described. This segment can be found in the following transcript(s): Z19178_PEA_{—}1_T5 (SEQ ID NO:17). Table 16 below describes the starting and ending position of this segment on each transcript.

[1384] Segment cluster Z19178_PEA_{—}1_node_{—}18 (SEQ ID NO:206) according to the present invention is supported by 47 libraries. The number of libraries was determined as previously described. This segment can be found in the following transcript(s): Z19178_PEA_{—}1_T5 (SEQ ID NO:17) and Z19178_PEA_{—}1_T9 (SEQ ID NO:18). Table 17 below describes the starting and ending position of this segment on each transcript.

[1385] Segment cluster Z19178_PEA_{—}1_node_{—}19 (SEQ ID NO:207) according to the present invention can be found in the following transcript(s): Z19178_PEA_{—}1_T5 (SEQ ID NO:17) and Z19178_PEA_{—}1_T9 (SEQ ID NO:18). Table 18 below describes the starting and ending position of this segment on each transcript.

[1386] Segment cluster Z19178_PEA_{—}1_node_{—}3 (SEQ ID NO:208) according to the present invention can be found in the following transcript(s): Z19178_PEA_{—}1_T5 (SEQ ID NO:17) and Z19178_PEA_{—}1_T9 (SEQ ID NO:18). Table 19 below describes the starting and ending position of this segment on each transcript.

[1387] Segment cluster Z19178_PEA_{—}1_node_{—}4 (SEQ ID NO:209) according to the present invention is supported by 29 libraries. The number of libraries was determined as previously described. This segment can be found in the following transcript(s): Z19178_PEA_{—}1_T9 (SEQ ID NO:18). Table 20 below describes the starting and ending position of this segment on each transcript.

[1388] Segment cluster Z19178_PEA_{—}1_node_{—}5 (SEQ ID NO:210) according to the present invention is supported by 31 libraries. The number of libraries was determined as previously described. This segment can be found in the following transcript(s): Z19178_PEA_{—}1_T9 (SEQ ID NO:18). Table 21 below describes the starting and ending position of this segment on each transcript.

[1389] Segment cluster Z19178_PEA_{—}1_node_{—}9 (SEQ ID NO:211) according to the present invention is supported by 58 libraries. The number of libraries was determined as previously described. This segment can be found in the following transcript(s): Z19178_PEA_{—}1_T5 (SEQ ID NO:17) and Z19178_PEA_{—}1_T9 (SEQ ID NO:18). Table 22 below describes the starting and ending position of this segment on each transcript.

Variant protein alignment to the previously known protein:

Sequence name: /tmp/HCEUPaHO0b/Molk3qa5mK:Q96C98 (SEQ ID NO:1390)

Sequence Documentation:

Alignment of: Z19178_PEA_{—}1_P5 (SEQ ID NO:550)×Q96C98 (SEQ ID NO:1390) ••

Alignment segment 1/1:

Alignment:

Sequence name: /tmp/HCEUPaHO0b/Molk3qa5mK:SLI2_HUMAN (SEQ ID NO:622)

Sequence Documentation:

Alignment of: Z19178_PEA_{—}1_P5 (SEQ ID NO:550)×SLI2_HUMAN (SEQ ID NO:622) ••

Alignment segment 1/1:

Alignment:

Sequence name: /tmp/HCEUPaHO0b/Molk3qa5mK:Q9BVA2 (SEQ ID NO:1391)

Sequence Documentation:

Alignment of: Z19178_PEA_{—}1_P5 (SEQ ID NO:550)×Q9BVA2 (SEQ ID NO:1391) ••

Alignment segment 1/1:

Alignment:

Sequence name: /tmp/n1VRxocMJO/rZHvyWGjFT:Q96C98 (SEQ ID NO:1390)

Sequence Documentation:

Alignment of: Z19178_PEA_{—}1_P6 (SEQ ID NO:551)×Q96C98 (SEQ ID NO:1390) ••

Alignment segment 1/1:

Alignment:

Sequence name: /tmp/n1VRxocMJO/rZHvyWGjFT:SLI2_HUMAN (SEQ ID NO:622)

Sequence Documentation:

Alignment of: Z19178_PEA_{—}1_P6 (SEQ ID NO:551)×SLI2_HUMAN (SEQ ID NO:622) ••

Alignment segment 1/1:

Alignment:

Sequence name: /tmp/n1VRxocMJO/rZHvyWGjFT:Q9BVA2 (SEQ ID NO:1391)

Sequence Documentation:

Alignment of: Z19178_PEA_{—}1_P6 (SEQ ID NO:551)×Q9BVA2 (SEQ ID NO:1391) ••

Alignment segment 1/1:

Alignment:

Description for Cluster S67314

[1390] Cluster S67314 features 4 transcript(s) and 8 segment(s) of interest, the names for which are given in Tables 1 and 2, respectively, the sequences themselves are given at the end of the application. The selected protein variants are given in table 3.

[1391] These sequences are variants of the known protein Fatty acid-binding protein, heart (SwissProt accession identifier FABH_HUMAN; known also according to the synonyms H-FABP; Muscle fatty acid-binding protein; M-FABP; Mammary-derived growth inhibitor; MDGI), SEQ ID NO: 623, referred to herein as the previously known protein.

[1392] Protein Fatty acid-binding protein (SEQ ID NO:623), heart is known or believed to have the following function(s): FABP are thought to play a role in the intracellular transport of long-chain fatty acids and their acyl-CoA esters. The sequence for protein Fatty acid-binding protein, heart is given at the end of the application, as “Fatty acid-binding protein, heart amino acid sequence”. Known polymorphisms for this sequence are as shown in Table 4.

[1393] Protein Fatty acid-binding protein (SEQ ID NO:623), heart localization is believed to be Cytoplasmic.

[1394] The following GO Annotation(s) apply to the previously known protein. The following annotation(s) were found: negative control of cell proliferation, which are annotation(s) related to Biological Process; and lipid binding, which are annotation(s) related to Molecular Function.

[1395] The GO assignment relies on information from one or more of the SwissProt/TremB1 Protein knowledgebase, available from <http://www.expasy.ch/sprot/>; or Locuslink, available from <http://www.ncbi.nlm.nih.gov/projects/LocusLink/>.

[1396] As noted above, cluster S67314 features 4 transcript(s), which were listed in Table 1 above. These transcript(s) encode for protein(s) which are variant(s) of protein Fatty acid-binding protein (SEQ ID NO:623), heart. A description of each variant protein according to the present invention is now provided.

[1397] Variant protein S67314_PEA_{—}1_P4 (SEQ ID NO:552) according to the present invention has an amino acid sequence as given at the end of the application; it is encoded by transcript(s) S67314_PEA_{—}1_T4 (SEQ ID NO:19). An alignment is given to the known protein (Fatty acid-binding protein (SEQ ID NO:623), heart) at the end of the application. One or more alignments to one or more previously published protein sequences are given at the end of the application. A brief description of the relationship of the variant protein according to the present invention to each such aligned protein is as follows:

[1398] Comparison report between S67314_PEA_{—}1_P4 (SEQ ID NO:552) and FABH_HUMAN (SEQ ID NO:623):

[1399] 1. An isolated chimeric polypeptide encoding for S67314_PEA_{—}1_P4 (SEQ ID NO:552), comprising a first amino acid sequence being at least 70%, optionally at least 80%, preferably at least 85%, more preferably at least 90% and most preferably at least 95% homologous to a polypeptide having the sequence MVDAFLGTWKLVDSKNFDDYMKSLGVGFATRQVASMTKPTTIIEKNGDILTLKTHSTF KNTEISFKLGVEFDETTADDRKVKSIVTLDGGKLVHLQKWDGQETTLVRELIDGKLIL corresponding to amino acids 1-116 of FABH_HUMAN (SEQ ID NO:623), which also corresponds to amino acids 1-116 of S67314_PEA_{—}1_P4 (SEQ ID NO:552), and a second amino acid sequence being at least 70%, optionally at least 80%, preferably at least 85%, more preferably at least 90% and most preferably at least 95% homologous to a polypeptide having the sequence VRWATLELYLIGYYYCSFSQACSKKPSPPLRAVEAGTREWLWVRVVSGGNFLCSGFGL TQAGTQILPYRLHDCGQITFSKCNCKTGINNTNLVGLLGSL (SEQ ID NO:1496) corresponding to amino acids 117-215 of S67314_PEA_{—}1_P4 (SEQ ID NO:552), wherein said first and second amino acid sequences are contiguous and in a sequential order.

[1400] 2. An isolated polypeptide encoding for a tail of S67314_PEA_{—}1_P4 (SEQ ID NO:552), comprising a polypeptide being at least 70%, optionally at least about 80%, preferably at least about 85%, more preferably at least about 90% and most preferably at least about 95% homologous to the sequence VRWATLELYLIGYYYCSFSQACSKKPSPPLRAVEAGTREWLWVRVVSGGNFLCSGFGL TQAGTQILPYRLHDCGQITFSKCNCKTGINNTNLVGLLGSL (SEQ ID NO:1496) in S67314_PEA_{—}1_P4 (SEQ ID NO:552).

[1401] Comparison report between S67314_PEA_{—}1_P4 (SEQ ID NO:552) and AAP35373(SEQ ID NO:1392):

[1402] 1. An isolated chimeric polypeptide encoding for S67314_PEA_{—}1_P4 (SEQ ID NO:552), comprising a first amino acid sequence being at least 90% homologous to MVDAFLGTWKLVDSKNFDDYMKSLGVGFATRQVASMTKPTTIIEKNGDILTLKTHSTF KNTEISFKLGVEFDETTADDRKVKSIVTLDGGKLVHLQKWDGQETTLVRELIDGKLIL corresponding to amino acids 1-116 of AAP35373 (SEQ ID NO:1392), which also corresponds to amino acids 1-116 of S67314_PEA_{—}1_P4 (SEQ ID NO:552), and a second amino acid sequence being at least 70%, optionally at least 80%, preferably at least 85%, more preferably at least 90% and most preferably at least 95% homologous to a polypeptide having the sequence VRWATLELYLIGYYYCSFSQACSKKPSPPLRAVEAGTREWLWVRVVSGGNFLCSGFGL TQAGTQILPYRLHDCGQITFSKCNCKTGINNTNLVGLLGSL (SEQ ID NO:1496) corresponding to amino acids 117-215 of S67314_PEA_{—}1_P4 (SEQ ID NO:552), wherein said first and second amino acid sequences are contiguous and in a sequential order.

[1403] 2. An isolated polypeptide encoding for a tail of S67314_PEA_{—}1_P4 (SEQ ID NO:552), comprising a polypeptide being at least 70%, optionally at least about 80%, preferably at least about 85%, more preferably at least about 90% and most preferably at least about 95% homologous to the sequence VRWATLELYLIGYYYCSFSQACSKKPSPPLRAVEAGTREWLWVRVVSGGNFLCSGFGL TQAGTQILPYRLHDCGQITFSKCNCKTGINNTNLVGLLGSL (SEQ ID NO:1496) in S67314_PEA_{—}1_P4 (SEQ ID NO:552).

[1404] The location of the variant protein was determined according to results from a number of different software programs and analyses, including analyses from SignalP and other specialized programs. The variant protein is believed to be located as follows with regard to the cell: intracellularly. The protein localization is believed to be intracellular because neither of the trans-membrane region prediction programs predicted a trans-membrane region for this protein. In addition both signal-peptide prediction programs predict that this protein is a non-secreted protein.

[1405] Variant protein S67314_PEA_{—}1_P4 (SEQ ID NO:552) also has the following non-silent SNPs (Single Nucleotide Polymorphisms) as listed in Table 5, (given according to their position(s) on the amino acid sequence, with the alternative amino acid(s) listed; the last column indicates whether the SNP is known or not; the presence of known SNPs in variant protein S67314_PEA_{—}1_P4 (SEQ ID NO:552) sequence provides support for the deduced sequence of this variant protein according to the present invention).

[1406] Variant protein S67314_PEA_{—}1_P4 (SEQ ID NO:552) is encoded by the following transcript(s): S67314_PEA_{—}1_T4 (SEQ ID NO:19, for which the sequence(s) is/are given at the end of the application. The coding portion of transcript S67314_PEA_{—}1_T4 (SEQ ID NO:19) is shown in bold; this coding portion starts at position 925 and ends at position 1569. The transcript also has the following SNPs as listed in Table 6 (given according to their position on the nucleotide sequence, with the alternative nucleic acid listed; the last column indicates whether the SNP is known or not; the presence of known SNPs in variant protein S67314_PEA_{—}1_P4 (SEQ ID NO:552) sequence provides support for the deduced sequence of this variant protein according to the present invention).

[1407] Variant protein S67314_PEA_{—}1_P5 (SEQ ID NO:553) according to the present invention has an amino acid sequence as given at the end of the application; it is encoded by transcript(s) S67314_PEA_{—}1_T5 (SEQ ID NO:20). An alignment is given to the known protein (Fatty acid-binding protein (SEQ ID NO:623), heart) at the end of the application. One or more alignments to one or more previously published protein sequences are given at the end of the application. A brief description of the relationship of the variant protein according to the present invention to each such aligned protein is as follows:

[1408] Comparison report between S67314_PEA_{—}1_P5 (SEQ ID NO:553) and FABH_HUMAN (SEQ ID NO:623):

[1409] 1. An isolated chimeric polypeptide encoding for S67314_PEA_{—}1_P5 (SEQ ID NO:553), comprising a first amino acid sequence being at least 70%, optionally at least 80%, preferably at least 85%, more preferably at least 90% and most preferably at least 95% homologous to a polypeptide having the sequence MVDAFLGTWKLVDSKNFDDYMKSLGVGFATRQVASMTKPTTIIEKNGDILTLKTHSTF KNTEISFKLGVEFDETTADDRKVKSIVTLDGGKLVHLQKWDGQETTLVRELIDGKLIL corresponding to amino acids 1-116 of FABH_HUMAN (SEQ ID NO:623), which also corresponds to amino acids 1-116 of S67314_PEA_{—}1_P5 (SEQ ID NO:553), and a second amino acid sequence being at least 70%, optionally at least 80%, preferably at least 85%, more preferably at least 90% and most preferably at least 95% homologous to a polypeptide having the sequence DVLTAWPSIYRRQVKVLREDEITILPWHLQWSREKATKLLRPTLPSYNNHGWEELRVG KSIV (SEQ ID NO:1497) corresponding to amino acids 117-178 of S67314_PEA_{—}1_P5 (SEQ ID NO:553), wherein said first and second amino acid sequences are contiguous and in a sequential order.

[1410] 2. An isolated polypeptide encoding for a tail of S67314_PEA_{—}1_P5 (SEQ ID NO:553), comprising a polypeptide being at least 70%, optionally at least about 80%, preferably at least about 85%, more preferably at least about 90% and most preferably at least about 95% homologous to the sequence DVLTAWPSIYRRQVKVLREDEITILPWHLQWSREKATKLLRPTLPSYNNHGWEELRVG KSIV (SEQ ID NO:1497) in S67314_PEA_{—}1_P5 (SEQ ID NO:553).

[1411] Comparison report between S67314_PEA_{—}1_P5 (SEQ ID NO:553) and AAP35373(SEQ ID NO:1392):

[1412] 1. An isolated chimeric polypeptide encoding for S67314_PEA_{—}1_P5 (SEQ ID NO:553), comprising a first amino acid sequence being at least 90% homologous to MVDAFLGTWKLVDSKNFDDYMKSLGVGFATRQVASMTKPTTIIEKNGDILTLKTHSTF KNTEISFKLGVEFDETTADDRKVKSIVTLDGGKLVHLQKWDGQETTLVRELIDGKLIL corresponding to amino acids 1-116 of AAP35373 (SEQ ID NO:1392), which also corresponds to amino acids 1-116 of S67314_PEA_{—}1_P5 (SEQ ID NO:553), and a second amino acid sequence being at least 70%, optionally at least 80%, preferably at least 85%, more preferably at least 90% and most preferably at least 95% homologous to a polypeptide having the sequence DVLTAWPSIYRRQVKVLREDEITILPWHLQWSREKATKLLRPTLPSYNNHGWEELRVG KSIV (SEQ ID NO:1497) corresponding to amino acids 117-178 of S67314_PEA_{—}1_P5 (SEQ ID NO:553), wherein said first and second amino acid sequences are contiguous and in a sequential order.

[1413] 2. An isolated polypeptide encoding for a tail of S67314_PEA_{—}1_P5 (SEQ ID NO:553), comprising a polypeptide being at least 70%, optionally at least about 80%, preferably at least about 85%, more preferably at least about 90% and most preferably at least about 95% homologous to the sequence DVLTAWPSIYRRQVKVLREDEITILPWHLQWSREKATKLLRPTLPSYNNHGWEELRVG KSIV (SEQ ID NO:1497) in S67314_PEA_{—}1_P5 (SEQ ID NO:553).

[1414] The location of the variant protein was determined according to results from a number of different software programs and analyses, including analyses from SignalP and other specialized programs. The variant protein is believed to be located as follows with regard to the cell: intracellularly. The protein localization is believed to be intracellular because neither of the trans-membrane region prediction programs predicted a trans-membrane region for this protein. In addition both signal-peptide prediction programs predict that this protein is a non-secreted protein.

[1415] Variant protein S67314_PEA_{—}1_P5 (SEQ ID NO:553) also has the following non-silent SNPs (Single Nucleotide Polymorphisms) as listed in Table 7, (given according to their position(s) on the amino acid sequence, with the alternative amino acid(s) listed; the last column indicates whether the SNP is known or not; the presence of known SNPs in variant protein S67314_PEA_{—}1_P5 (SEQ ID NO:553) sequence provides support for the deduced sequence of this variant protein according to the present invention).

[1416] Variant protein S67314_PEA_{—}1_P5 (SEQ ID NO:553) is encoded by the following transcript(s): S67314_PEA_{—}1_T5 (SEQ ID NO:20), for which the sequence(s) is/are given at the end of the application. The coding portion of transcript S67314_PEA_{—}1_T5 (SEQ ID NO:20) is shown in bold; this coding portion starts at position 925 and ends at position 1458. The transcript also has the following SNPs as listed in Table 8 (given according to their position on the nucleotide sequence, with the alternative nucleic acid listed; the last column indicates whether the SNP is known or not; the presence of known SNPs in variant protein S67314_PEA_{—}1_P5 (SEQ ID NO:553) sequence provides support for the deduced sequence of this variant protein according to the present invention).

[1417] Variant protein S67314_PEA_{—}1_P6 (SEQ ID NO:554) according to the present invention has an amino acid sequence as given at the end of the application; it is encoded by transcript(s) S67314_PEA_{—}1_T6 (SEQ ID NO:21). An alignment is given to the known protein (Fatty acid-binding protein (SEQ ID NO:623), heart) at the end of the application. One or more alignments to one or more previously published protein sequences are given at the end of the application. A brief description of the relationship of the variant protein according to the present invention to each such aligned protein is as follows:

[1418] Comparison report between S67314_PEA_{—}1_P6 (SEQ ID NO:554) and FABH_HUMAN (SEQ ID NO:623):

[1419] 1. An isolated chimeric polypeptide encoding for S67314_PEA_{—}1_P6 (SEQ ID NO:554), comprising a first amino acid sequence being at least 70%, optionally at least 80%, preferably at least 85%, more preferably at least 90% and most preferably at least 95% homologous to a polypeptide having the sequence MVDAFLGTWKLVDSKNFDDYMKSLGVGFATRQVASMTKPTTIIEKNGDILTLKTHSTF KNTEISFKLGVEFDETTADDRKVKSIVTLDGGKLVHLQKWDGQETTLVRELIDGKLIL corresponding to amino acids 1-116 of FABH_HUMAN (SEQ ID NO:623), which also corresponds to amino acids 1-116 of S67314_PEA_{—}1_P6 (SEQ ID NO:554), and a second amino acid sequence being at least 70%, optionally at least 80%, preferably at least 85%, more preferably at least 90% and most preferably at least 95% homologous to a polypeptide having the sequence MEKLQLRNVK (SEQ ID NO:1498) corresponding to amino acids 117-126 of S67314_PEA_{—}1_P6 (SEQ ID NO:554), wherein said first and second amino acid sequences are contiguous and in a sequential order.

[1420] 2. An isolated polypeptide encoding for a tail of S67314_PEA_{—}1_P6 (SEQ ID NO:554), comprising a polypeptide being at least 70%, optionally at least about 80%, preferably at least about 85%, more preferably at least about 90% and most preferably at least about 95% homologous to the sequence MEKLQLRNVK (SEQ ID NO:1498) in S67314_PEA_{—}1_P6 (SEQ ID NO:554).

[1421] Comparison report between S67314_PEA_{—}1_P6 (SEQ ID NO:554) and AAP35373 (SEQ ID NO:1392):

[1422] 1. An isolated chimeric polypeptide encoding for S67314_PEA_{—}1_P6 (SEQ ID NO:554), comprising a first amino acid sequence being at least 90% homologous to MVDAFLGTWKLVDSKNFDDYMKSLGVGFATRQVASMTKPTTIIEKNGDILTLKTHSTF KNTEISFKLGVEFDETTADDRKVKSIVTLDGGKLVHLQKWDGQETTLVRELIDGKLIL corresponding to amino acids 1-116 of AAP35373 (SEQ ID NO:1392), which also corresponds to amino acids 1-116 of S67314_PEA_{—}1_P6 (SEQ ID NO:554), and a second amino acid sequence being at least 70%, optionally at least 80%, preferably at least 85%, more preferably at least 90% and most preferably at least 95% homologous to a polypeptide having the sequence MEKLQLRNVK (SEQ ID NO:1498) corresponding to amino acids 117-126 of S67314_PEA_{—}1_P6 (SEQ ID NO:554), wherein said first and second amino acid sequences are contiguous and in a sequential order.

[1423] 2. An isolated polypeptide encoding for a tail of S67314_PEA_{—}1_P6 (SEQ ID NO:554), comprising a polypeptide being at least 70%, optionally at least about 80%, preferably at least about 85%, more preferably at least about 90% and most preferably at least about 95% homologous to the sequence MEKLQLRNVK (SEQ ID NO:1498) in S67314_PEA_{—}1_P6 (SEQ ID NO:554).

[1424] The location of the variant protein was determined according to results from a number of different software programs and analyses, including analyses from SignalP and other specialized programs. The variant protein is believed to be located as follows with regard to the cell: intracellularly. The protein localization is believed to be intracellular because neither of the trans-membrane region prediction programs predicted a trans-membrane region for this protein. In addition both signal-peptide prediction programs predict that this protein is a non-secreted protein.

[1425] Variant protein S67314_PEA_{—}1_P6 (SEQ ID NO:554) also has the following non-silent SNPs (Single Nucleotide Polymorphisms) as listed in Table 9, (given according to their position(s) on the amino acid sequence, with the alternative amino acid(s) listed; the last column indicates whether the SNP is known or not; the presence of known SNPs in variant protein S67314_PEA_{—}1_P6 (SEQ ID NO:554) sequence provides support for the deduced sequence of this variant protein according to the present invention).

[1426] Variant protein S67314_PEA_{—}1_P6 (SEQ ID NO:554) is encoded by the following transcript(s): S67314_PEA_{—}1_T6 (SEQ ID NO:21), for which the sequence(s) is/are given at the end of the application. The coding portion of transcript S67314_PEA_{—}1_T6 (SEQ ID NO:21) is shown in bold; this coding portion starts at position 925 and ends at position 1302. The transcript also has the following SNPs as listed in Table 10 (given according to their position on the nucleotide sequence, with the alternative nucleic acid listed; the last column indicates whether the SNP is known or not; the presence of known SNPs in variant protein S67314_PEA_{—}1_P6 (SEQ ID NO:554) sequence provides support for the deduced sequence of this variant protein according to the present invention).

[1427] Variant protein S67314_PEA_{—}1_P7 (SEQ ID NO:555) according to the present invention has an amino acid sequence as given at the end of the application; it is encoded by transcript(s) S67314_PEA_{—}1_T7 (SEQ ID NO:22). An alignment is given to the known protein (Fatty acid-binding protein (SEQ ID NO:623), heart) at the end of the application. One or more alignments to one or more previously published protein sequences are given at the end of the application. A brief description of the relationship of the variant protein according to the present invention to each such aligned protein is as follows:

[1428] Comparison report between S67314_PEA_{—}1_P7 (SEQ ID NO:555) and FABH_HUMAN (SEQ ID NO:623):

[1429] 1. An isolated chimeric polypeptide encoding for S67314_PEA_{—}1_P7 (SEQ ID NO:555), comprising a first amino acid sequence being at least 90% homologous to MVDAFLGTWKLVDSKNFDDYMKSL corresponding to amino acids 1-24 of FABH_HUMAN (SEQ ID NO:623), which also corresponds to amino acids 1-24 of S67314_PEA_{—}1_P7 (SEQ ID NO:555), second amino acid sequence being at least 70%, optionally at least 80%, preferably at least 85%, more preferably at least 90% and most preferably at least 95% homologous to a polypeptide having the sequence AHILITFPLPS (SEQ ID NO:1499) corresponding to amino acids 25-35 of S67314_PEA_{—}1_P7 (SEQ ID NO:555), and a third amino acid sequence being at least 90% homologous to GVGFATRQVASMTKPTTIIEKNGDILTLKTHSTFKNTEISFKLGVEFDETTADDRKVKSI VTLDGGKLVHLQKWDGQETTLVRELIDGKLILTLTHGTAVCTRTYEKEA corresponding to amino acids 25-133 of FABH_HUMAN (SEQ ID NO:623), which also corresponds to amino acids 36-144 of S67314_PEA_{—}1_P7 (SEQ ID NO:555), wherein said first, second, third and fourth amino acid sequences are contiguous and in a sequential order.

[1430] 2. An isolated polypeptide encoding for an edge portion of S67314_PEA_{—}1_P7 (SEQ ID NO:555), comprising an amino acid sequence being at least 70%, optionally at least about 80%, preferably at least about 85%, more preferably at least about 90% and most preferably at least about 95% homologous to the sequence encoding for AHILITFPLPS (SEQ ID NO:1499), corresponding to S67314_PEA_{—}1_P7 (SEQ ID NO:555).

[1431] Comparison report between S67314_PEA_{—}1_P7 (SEQ ID NO:555) and AAP35373(SEQ ID NO:1392):

[1432] 1. An isolated chimeric polypeptide encoding for S67314_PEA_{—}1_P7 (SEQ ID NO:555), comprising a first amino acid sequence being at least 90% homologous to MVDAFLGTWKLVDSKNFDDYMKSL corresponding to amino acids 1-24 of AAP35373 (SEQ ID NO:1392), which also corresponds to amino acids 1-24 of S67314_PEA_{—}1_P7 (SEQ ID NO:555), second amino acid sequence being at least 70%, optionally at least 80%, preferably at least 85%, more preferably at least 90% and most preferably at least 95% homologous to a polypeptide having the sequence AHILITFPLPS (SEQ ID NO:1499) corresponding to amino acids 25-35 of S67314_PEA_{—}1_P7 (SEQ ID NO:555), and a third amino acid sequence being at least 90% homologous to GVGFATRQVASMTKPTTIIEKNGDILTLKTHSTFKNTEISFKLGVEFDETTADDRKVKSI VTLDGGKLVHLQKWDGQETTLVRELIDGKLILTLTHGTAVCTRTYEKEA corresponding to amino acids 25-133 of AAP35373 (SEQ ID NO:1392), which also corresponds to amino acids 36-144 of S67314_PEA_{—}1_P7 (SEQ ID NO:555), wherein said first, second and third amino acid sequences are contiguous and in a sequential order.

[1433] 2. An isolated polypeptide encoding for an edge portion of S67314_PEA_{—}1_P7 (SEQ ID NO:555), comprising an amino acid sequence being at least 70%, optionally at least about 80%, preferably at least about 85%, more preferably at least about 90% and most preferably at least about 95% homologous to the sequence encoding for AHILITFPLPS (SEQ ID NO:1499), corresponding to S67314_PEA_{—}1_P7 (SEQ ID NO:555).

[1434] The location of the variant protein was determined according to results from a number of different software programs and analyses, including analyses from SignalP and other specialized programs. The variant protein is believed to be located as follows with regard to the cell: intracellularly. The protein localization is believed to be intracellular because neither of the trans-membrane region prediction programs predicted a trans-membrane region for this protein. In addition both signal-peptide prediction programs predict that this protein is a non-secreted protein.

[1435] Variant protein S67314_PEA_{—}1_P7 (SEQ ID NO:555) also has the following non-silent SNPs (Single Nucleotide Polymorphisms) as listed in Table 11, (given according to their position(s) on the amino acid sequence, with the alternative amino acid(s) listed; the last column indicates whether the SNP is known or not; the presence of known SNPs in variant protein S67314_PEA_{—}1_P7 (SEQ ID NO:555) sequence provides support for the deduced sequence of this variant protein according to the present invention).

[1436] Variant protein S67314_PEA_{—}1_P7 (SEQ ID NO:555) is encoded by the following transcript(s): S67314_PEA_{—}1_T7 (SEQ ID NO:22, for which the sequence(s) is/are given at the end of the application. The coding portion of transcript S67314_PEA_{—}1_T7 (SEQ ID NO:22) is shown in bold; this coding portion starts at position 925 and ends at position 1356. The transcript also has the following SNPs as listed in Table 12 (given according to their position on the nucleotide sequence, with the alternative nucleic acid listed; the last column indicates whether the SNP is known or not; the presence of known SNPs in variant protein S67314_PEA_{—}1_P7 (SEQ ID NO:555) sequence provides support for the deduced sequence of this variant protein according to the present invention).

[1437] As noted above, cluster S67314 features 8 segment(s), which were listed in Table 2 above and for which the sequence(s) are given at the end of the application. These segment(s) are portions of nucleic acid sequence(s) which are described herein separately because they are of particular interest. A description of each segment according to the present invention is now provided.

[1438] Segment cluster S67314_PEA_{—}1_node_{—}0 (SEQ ID NO:212) according to the present invention is supported by 90 libraries. The number of libraries was determined as previously described. This segment can be found in the following transcript(s): S67314_PEA_{—}1_T4 (SEQ ID NO:19), S67314_PEA_{—}1_T5 (SEQ ID NO:20), S67314_PEA_{—}1_T6 (SEQ ID NO:21) and S67314_PEA_{—}1_T7 (SEQ ID NO:22). Table 13 below describes the starting and ending position of this segment on each transcript.

[1439] Segment cluster S67314_PEA_{—}1_node_{—}11 (SEQ ID NO:213) according to the present invention is supported by 6 libraries. The number of libraries was determined as previously described. This segment can be found in the following transcript(s): S67314_PEA_{—}1_T4 (SEQ ID NO:19). Table 14 below describes the starting and ending position of this segment on each transcript.

[1440] Segment cluster S67314_PEA_{—}1_node_{—}13 (SEQ ID NO:214) according to the present invention is supported by 76 libraries. The number of libraries was determined as previously described. This segment can be found in the following transcript(s): S67314_PEA_{—}1_T7 (SEQ ID NO:22). Table 15 below describes the starting and ending position of this segment on each transcript.

[1441] Segment cluster S67314_PEA_{—}1_node_{—}15 (SEQ ID NO:215) according to the present invention is supported by 1 libraries. The number of libraries was determined as previously described. This segment can be found in the following transcript(s): S67314_PEA_{—}1_T5 (SEQ ID NO:20. Table 16 below describes the starting and ending position of this segment on each transcript.

[1442] Segment cluster S67314_PEA_{—}1_node_{—}17 (SEQ ID NO:216) according to the present invention is supported by 4 libraries. The number of libraries was determined as previously described. This segment can be found in the following transcript(s): S67314_PEA_{—}1_T6 (SEQ ID NO:21). Table 17 below describes the starting and ending position of this segment on each transcript.

[1443] Microarray (chip) data is also available for this segment as follows. As described above with regard to the cluster itself, various oligonucleotides were tested for being differentially expressed in various disease conditions, particularly cancer. The following oligonucleotides were found to hit this segment with regard to colon cancer, shown in Table 18.

[1444] As a general note, oligonucleotide S67314_{—}0_{—}0_{—}741 was overexpressed in colon cancer; this oligonucleotide maps to at least one part of this cluster.

[1445] Segment cluster S67314_PEA_{—}1_node_{—}4 (SEQ ID NO:217) according to the present invention is supported by 101 libraries. The number of libraries was determined as previously described. This segment can be found in the following transcript(s): S67314_PEA_{—}1_T4 (SEQ ID NO:19), S67314_PEA_{—}1_T5 (SEQ ID NO:20, S67314_PEA_{—}1_T6 (SEQ ID NO:21) and S67314_PEA_{—}1_T7 (SEQ ID NO:22). Table 19 below describes the starting and ending position of this segment on each transcript.

[1446] According to an optional embodiment of the present invention, short segments related to the above cluster are also provided. These segments are up to about 120 bp in length, and so are included in a separate description.

[1447] Segment cluster S67314_PEA_{—}1_node_{—}10 (SEQ ID NO:218) according to the present invention is supported by 64 libraries. The number of libraries was determined as previously described. This segment can be found in the following transcript(s): S67314_PEA_{—}1_T4 (SEQ ID NO:19), S67314_PEA_{—}1_T5 (SEQ ID NO:20, S67314_PEA_{—}1_T6 (SEQ ID NO:21) and S67314_PEA_{—}1_T7 (SEQ ID NO:22). Table 20 below describes the starting and ending position of this segment on each transcript.

[1448] Segment cluster S67314_PEA_{—}1_node_{—}3 (SEQ ID NO:219) according to the present invention is supported by 1 libraries. The number of libraries was determined as previously described. This segment can be found in the following transcript(s): S67314_PEA_{—}1_T7 (SEQ ID NO:22). Table 21 below describes the starting and ending position of this segment on each transcript.

Variant protein alignment to the previously known protein:

Sequence name: /tmp/EQ0nMn6tqU/R73CUVKUk5:FABH_HUMAN (SEQ ID NO:623)

Sequence Documentation:

Alignment of: S67314_PEA_{—}1_P4 (SEQ ID NO:552)×FABH_HUMAN (SEQ ID NO:623) ••

Alignment segment 1/1:

Alignment:

Sequence name: /tmp/EQ0nMn6tqU/R73CUVKUk5:AAP35373 (SEQ ID NO:1392)

Sequence Documentation:

Alignment of: S67314_PEA_{—}1_P4 (SEQ ID NO:552)×AAP35373 (SEQ ID NO:1392) ••

Alignment segment 1/1:

Alignment:

Sequence name: /tmp/ql4YPIBbdQ/SeofJfCmJW:FABH_HUMAN (SEQ ID NO:623)

Sequence Documentation:

Alignment of: S67314_PEA_{—}1_P5 (SEQ ID NO:553)×FABH_HUMAN (SEQ ID NO:623) ••

Alignment segment 1/1:

Alignment:

Sequence name: /tmp/ql4YPIBbdQ/SeofJfCmJW:AAP35373 (SEQ ID NO:1392)

Sequence Documentation:

Alignment of: S67314_PEA_{—}1_P5 (SEQ ID NO:553)×AAP35373 (SEQ ID NO:1392) ••

Alignment segment 1/1:

Alignment:

Sequence name: /tmp/PXra2DxL1v/Q8GTrzNMVX:FABH_HUMAN (SEQ ID NO:623)

Sequence Documentation:

Alignment of: S67314_PEA_{—}1_P6 (SEQ ID NO:554)×FABH_HUMAN (SEQ ID NO:623) ••

Alignment segment 1/1:

Alignment:

Sequence name: /tmp/PXra2DxL1v/Q8GTrzNMVX:AAP35373 (SEQ ID NO:1392)

Sequence Documentation:

Alignment of: S67314_PEA_{—}1_P6 (SEQ ID NO:554)×AAP35373 (SEQ ID NO:1392) ••

Alignment segment 1/1:

Alignment:

Sequence name: /tmp/xYzWyViDom/twDu3T69pd:FABH_HUMAN (SEQ ID NO:623)

Sequence Documentation:

Alignment of: S67314_PEA_{—}1_P7 (SEQ ID NO:555)×FABH_HUMAN (SEQ ID NO:623) ••

Alignment segment 1/1:

Alignment:

Sequence name: /tmp/xYzWyViDom/twDu3T69pd:AAP35373 (SEQ ID NO:1392)

Sequence Documentation:

Alignment of: S67314_PEA_{—}1_P7 (SEQ ID NO:555)×AAP35373 (SEQ ID NO:1392) ••

Alignment segment 1/1:

Alignment:

Description for Cluster Z44808

[1449] Cluster Z44808 features 5 transcript(s) and 21 segment(s) of interest, the names for which are given in Tables 1 and 2, respectively, the sequences themselves are given at the end of the application. The selected protein variants are given in table 3.

[1450] These sequences are variants of the known protein SPARC related modular calcium-binding protein 2 precursor (SwissProt accession identifier SMO2_HUMAN; known also according to the synonyms Secreted modular calcium-binding protein 2; SMOC-2; Smooth muscle-associated protein 2; SMAP-2; MSTP117), SEQ ID NO: 624, referred to herein as the previously known protein.

[1451] Protein SPARC related modular calcium-binding protein 2 precursor is known or believed to have the following function(s): calcium binding. The sequence for protein SPARC related modular calcium-binding protein 2 precursor (SEQ ID NO:624) is given at the end of the application, as “SPARC related modular calcium-binding protein 2 precursor amino acid sequence”. Known polymorphisms for this sequence are as shown in Table 4.

[1452] Protein SPARC related modular calcium-binding protein 2 precursor (SEQ ID NO:624) localization is believed to be Secreted (Probable).

[1453] Cluster Z44808 can be used as a diagnostic marker according to overexpression of transcripts of this cluster in cancer. Expression of such transcripts in normal tissues is also given according to the previously described methods. The term “number” in the right hand column of the table and the numbers on the y-axis of the figure below refer to weighted expression of ESTs in each category, as “parts per million” (ratio of the expression of ESTs for a particular cluster to the expression of all ESTs in that category, according to parts per million).

[1454] Overall, the following results were obtained as shown with regard to the histograms in FIG. 19 and Table 5. This cluster is overexpressed (at least at a minimum level) in the following pathological conditions: colorectal cancer, lung cancer and pancreas carcinoma.

[1455] As noted above, cluster Z44808 features 5 transcript(s), which were listed in Table 1 above. These transcript(s) encode for protein(s) which are variant(s) of protein SPARC related modular calcium-binding protein 2 precursor (SEQ ID NO:624). A description of each variant protein according to the present invention is now provided.

[1456] Variant protein Z44808_PEA_{—}1_P5 (SEQ ID NO:556) according to the present invention has an amino acid sequence as given at the end of the application; it is encoded by transcript(s) Z44808_PEA_{—}1_T4 (SEQ ID NO:24). An alignment is given to the known protein (SPARC related modular calcium-binding protein 2 precursor (SEQ ID NO:624)) at the end of the application. One or more alignments to one or more previously published protein sequences are given at the end of the application. A brief description of the relationship of the variant protein according to the present invention to each such aligned protein is as follows:

[1457] Comparison report between Z44808_PEA_{—}1_P5 (SEQ ID NO:556) and SMO2_HUMAN (SEQ ID NO:624):

[1458] 1. An isolated chimeric polypeptide encoding for Z44808_PEA_{—}1_P5 (SEQ ID NO:556), comprising a first amino acid sequence being at least 90% homologous to MLLPQLCWLPLLAGLLPPVPAQKFSALTFLRVDQDKDKDCSLDCAGSPQKPLCASDGR TFLSRCEFQRAKCKDPQLEIAYRGNCKDVSRCVAERKYTQEQARKEFQQVFIPECNDD GTYSQVQCHSYTGYCWCVTPNGRPISGTAVAHKTPRCPGSVNEKLPQREGTGKTDDAA APALETQPQGDEEDIASRYPTLWTEQVKSRQNKTNKNSVSSCDQEHQSALEEAKQPKN DNVVIPECAHGGLYKPVQCHPSTGYCWCVLVDTGRPIPGTSTRYEQPKCDNTARAHPA KARDLYKGRQLQGCPGAKKHEFLTSVLDALSTDMVHAASDPSSSSGRLSEPDPSHTLEE RVVHWYFKLLDKNSSGDIGKKEIKPFKRFLRKKSKPKKCVKKFVEYCDVNNDKSISVQ ELMGCLGVAKEDGKADTKKRHTPRGHAESTSNRQ corresponding to amino acids 1-441 of SMO2_HUMAN (SEQ ID NO:624), which also corresponds to amino acids 1-441 of Z44808_PEA_{—}1_P5 (SEQ ID NO:556), and a second amino acid sequence being at least 70%, optionally at least 80%, preferably at least 85%, more preferably at least 90% and most preferably at least 95% homologous to a polypeptide having the sequence DAMVVSSRPKATTHRKSRTLSRR (SEQ ID NO:1500) corresponding to amino acids 442-464 of Z44808_PEA_{—}1_P5 (SEQ ID NO:556), wherein said first and second amino acid sequences are contiguous and in a sequential order.

[1459] 2. An isolated polypeptide encoding for a tail of Z44808_PEA_{—}1_P5 (SEQ ID NO:556), comprising a polypeptide being at least 70%, optionally at least about 80%, preferably at least about 85%, more preferably at least about 90% and most preferably at least about 95% homologous to the sequence DAMVVSSRPKATTHRKSRTLSRR (SEQ ID NO:1500) in Z44808_PEA_{—}1_P5 (SEQ ID NO:556).

[1460] The location of the variant protein was determined according to results from a number of different software programs and analyses, including analyses from SignalP and other specialized programs. The variant protein is believed to be located as follows with regard to the cell: secreted. The protein localization is believed to be secreted because both signal-peptide prediction programs predict that this protein has a signal peptide, and neither trans-membrane region prediction program predicts that this protein has a trans-membrane region.

[1461] Variant protein Z44808_PEA_{—}1_P5 (SEQ ID NO:556) is encoded by the following transcript(s): Z44808_PEA_{—}1_T4 (SEQ ID NO:24), for which the sequence(s) is/are given at the end of the application. The coding portion of transcript Z44808_PEA_{—}1_T4 (SEQ ID NO:24) is shown in bold; this coding portion starts at position 586 and ends at position 1977. The transcript also has the following SNPs as listed in Table 7 (given according to their position on the nucleotide sequence, with the alternative nucleic acid listed; the last column indicates whether the SNP is known or not; the presence of known SNPs in variant protein Z44808_PEA_{—}1_P5 (SEQ ID NO:556) sequence provides support for the deduced sequence of this variant protein according to the present invention).

[1462] Variant protein Z44808_PEA_{—}1_P6 (SEQ ID NO:557) according to the present invention has an amino acid sequence as given at the end of the application; it is encoded by transcript(s) Z44808_PEA_{—}1_T5 (SEQ ID NO:25). An alignment is given to the known protein (SPARC related modular calcium-binding protein 2 precursor (SEQ ID NO:624)) at the end of the application. One or more alignments to one or more previously published protein sequences are given at the end of the application. A brief description of the relationship of the variant protein according to the present invention to each such aligned protein is as follows:

[1463] Comparison report between Z44808_PEA_{—}1_P6 (SEQ ID NO:557) and SMO2_HUMAN (SEQ ID NO:624):

[1464] 1. An isolated chimeric polypeptide encoding for Z44808_PEA_{—}1_P6 (SEQ ID NO:557), comprising a first amino acid sequence being at least 90% homologous to MLLPQLCWLPLLAGLLPPVPAQKFSALTFLRVDQDKDKDCSLDCAGSPQKPLCASDGR TFLSRCEFQRAKCKDPQLEIAYRGNCKDVSRCVAERKYTQEQARKEFQQVFIPECNDD GTYSQVQCHSYTGYCWCVTPNGRPISGTAVAHKTPRCPGSVNEKLPQREGTGKTDDAA APALETQPQGDEEDIASRYPTLWTEQVKSRQNKTNKNSVSSCDQEHQSALEEAKQPKN DNVVIPECAHGGLYKPVQCHPSTGYCWCVLVDTGRPIPGTSTRYEQPKCDNTARAHPA KARDLYKGRQLQGCPGAKKHEFLTSVLDALSTDMVHAASDPSSSSGRLSEPDPSHTLEE RVVHWYFKLLDKNSSGDIGKKEIKPFKRFLRKKSKPKKCVKKFVEYCDVNNDKSISVQ ELMGCLGVAKEDGKADTKKRH corresponding to amino acids 1-428 of SMO2_HUMAN (SEQ ID NO:624), which also corresponds to amino acids 1-428 of Z44808_PEA_{—}1_P6 (SEQ ID NO:557), and a second amino acid sequence being at least 70%, optionally at least 80%, preferably at least 85%, more preferably at least 90% and most preferably at least 95% homologous to a polypeptide having the sequence RSKRNL (SEQ ID NO:1501) corresponding to amino acids 429-434 of Z44808_PEA_{—}1_P6 (SEQ ID NO:557), wherein said first and second amino acid sequences are contiguous and in a sequential order.

[1465] 2. An isolated polypeptide encoding for a tail of Z44808_PEA_{—}1_P6 (SEQ ID NO:557) comprising a polypeptide being at least 70%, optionally at least about 80%, preferably at least about 85%, more preferably at least about 90% and most preferably at least about 95% homologous to the sequence RSKRNL (SEQ ID NO:1501) in Z44808_PEA_{—}1_P6 (SEQ ID NO:557).

[1466] The location of the variant protein was determined according to results from a number of different software programs and analyses, including analyses from SignalP and other specialized programs. The variant protein is believed to be located as follows with regard to the cell: secreted. The protein localization is believed to be secreted because both signal-peptide prediction programs predict that this protein has a signal peptide, and neither trans-membrane region prediction program predicts that this protein has a trans-membrane region.

[1467] Variant protein Z44808_PEA_{—}1_P6 (SEQ ID NO:557) also has the following non-silent SNPs (Single Nucleotide Polymorphisms) as listed in Table 8, (given according to their position(s) on the amino acid sequence, with the alternative amino acid(s) listed; the last column indicates whether the SNP is known or not; the presence of known SNPs in variant protein Z44808_PEA_{—}1_P6 (SEQ ID NO:557) sequence provides support for the deduced sequence of this variant protein according to the present invention).

[1468] Variant protein Z44808_PEA_{—}1_P6 (SEQ ID NO:557) is encoded by the following transcript(s): Z44808_PEA_{—}1_T5 (SEQ ID NO:25, for which the sequence(s) is/are given at the end of the application. The coding portion of transcript Z44808_PEA_{—}1_T5 (SEQ ID NO:25) is shown in bold; this coding portion starts at position 586 and ends at position 1887. The transcript also has the following SNPs as listed in Table 9 (given according to their position on the nucleotide sequence, with the alternative nucleic acid listed; the last column indicates whether the SNP is known or not; the presence of known SNPs in variant protein Z44808_PEA_{—}1_P6 (SEQ ID NO:557) sequence provides support for the deduced sequence of this variant protein according to the present invention).

[1469] Variant protein Z44808_PEA_{—}1_P7 (SEQ ID NO:558) according to the present invention has an amino acid sequence as given at the end of the application; it is encoded by transcript(s) Z44808_PEA_{—}1_T9 (SEQ ID NO:27). An alignment is given to the known protein (SPARC related modular calcium-binding protein 2 precursor (SEQ ID NO:624)) at the end of the application. One or more alignments to one or more previously published protein sequences are given at the end of the application. A brief description of the relationship of the variant protein according to the present invention to each such aligned protein is as follows:

[1470] Comparison report between Z44808_PEA_{—}1_P7 (SEQ ID NO:558) and SMO2_HUMAN (SEQ ID NO:624):

[1471] 1. An isolated chimeric polypeptide encoding for Z44808_PEA_{—}1_P7 (SEQ ID NO:558), comprising a first amino acid sequence being at least 90% homologous to MLLPQLCWLPLLAGLLPPVPAQKFSALTFLRVDQDKDKDCSLDCAGSPQKPLCASDGR TFLSRCEFQRAKCKDPQLEIAYRGNCKDVSRCVAERKYTQEQARKEFQQVFIPECNDD GTYSQVQCHSYTGYCWCVTPNGRPISGTAVAHKTPRCPGSVNEKLPQREGTGKTDDAA APALETQPQGDEEDIASRYPTLWTEQVKSRQNKTNKNSVSSCDQEHQSALEEAKQPKN DNVVIPECAHGGLYKPVQCHPSTGYCWCVLVDTGRPIPGTSTRYEQPKCDNTARAHPA KARDLYKGRQLQGCPGAKKHEFLTSVLDALSTDMVHAASDPSSSSGRLSEPDPSHTLEE RVVHWYFKLLDKNSSGDIGKKEIKPFKRFLRKKSKPKKCVKKFVEYCDVNNDKSISVQ ELMGCLGVAKEDGKADTKKRHTPRGHAESTSNRQ corresponding to amino acids 1-441 of SMO2_HUMAN (SEQ ID NO:624), which also corresponds to amino acids 1-441 of Z44808_PEA_{—}1_P7 (SEQ ID NO:558), and a second amino acid sequence being at least 70%, optionally at least 80%, preferably at least 85%, more preferably at least 90% and most preferably at least 95% homologous to a polypeptide having the sequence LLWLRGKVSFYCF (SEQ ID NO:1502) corresponding to amino acids 442-454 of Z44808_PEA_{—}1_P7 (SEQ ID NO:558), wherein said first and second amino acid sequences are contiguous and in a sequential order.

[1472] 2. An isolated polypeptide encoding for a tail of Z44808_PEA_{—}1_P7 (SEQ ID NO:558), comprising a polypeptide being at least 70%, optionally at least about 80%, preferably at least about 85%, more preferably at least about 90% and most preferably at least about 95% homologous to the sequence LLWLRGKVSFYCF (SEQ ID NO:1502) in Z44808_PEA_{—}1_P7 (SEQ ID NO:558).

[1473] The location of the variant protein was determined according to results from a number of different software programs and analyses, including analyses from SignalP and other specialized programs. The variant protein is believed to be located as follows with regard to the cell: secreted. The protein localization is believed to be secreted because both signal-peptide prediction programs predict that this protein has a signal peptide, and neither trans-membrane region prediction program predicts that this protein has a trans-membrane region.

[1474] Variant protein Z44808_PEA_{—}1_P7 (SEQ ID NO:558) also has the following non-silent SNPs (Single Nucleotide Polymorphisms) as listed in Table 10, (given according to their position(s) on the amino acid sequence, with the alternative amino acid(s) listed; the last column indicates whether the SNP is known or not; the presence of known SNPs in variant protein Z44808_PEA_{—}1_P7 (SEQ ID NO:558) sequence provides support for the deduced sequence of this variant protein according to the present invention).

[1475] Variant protein Z44808_PEA_{—}1_P7 (SEQ ID NO:558) is encoded by the following transcript(s): Z44808_PEA_{—}1_T9 (SEQ ID NO:27, for which the sequence(s) is/are given at the end of the application. The coding portion of transcript Z44808_PEA_{—}1_T9 (SEQ ID NO:27) is shown in bold; this coding portion starts at position 586 and ends at position 1947. The transcript also has the following SNPs as listed in Table 11 (given according to their position on the nucleotide sequence, with the alternative nucleic acid listed; the last column indicates whether the SNP is known or not; the presence of known SNPs in variant protein Z44808_PEA_{—}1_P7 (SEQ ID NO:558) sequence provides support for the deduced sequence of this variant protein according to the present invention).

[1476] Variant protein Z44808_PEA_{—}1_P11 (SEQ ID NO:559) according to the present invention has an amino acid sequence as given at the end of the application; it is encoded by transcript(s) Z44808_PEA_{—}1_T11 (SEQ ID NO:23). The identification of this transcript was performed using a non-EST based method for identification of alternative splicing, described in the following reference: “Sorek R et al., Genome Res. (2004) 14:1617-23.” An alignment is given to the known protein (SPARC related modular calcium-binding protein 2 precursor (SEQ ID NO:624)) at the end of the application. One or more alignments to one or more previously published protein sequences are given at the end of the application. A brief description of the relationship of the variant protein according to the present invention to each such aligned protein is as follows:

[1477] Comparison report between Z44808_PEA_{—}1_P11 (SEQ ID NO:559) and SMO2_HUMAN (SEQ ID NO:624):

[1478] 1. An isolated chimeric polypeptide encoding for Z44808_PEA_{—}1_P11 (SEQ ID NO:559) comprising a first amino acid sequence being at least 90% homologous to MLLPQLCWLPLLAGLLPPVPAQKFSALTFLRVDQDKDKDCSLDCAGSPQKPLCASDGR TFLSRCEFQRAKCKDPQLEIAYRGNCKDVSRCVAERKYTQEQARKEFQQVFIPECNDD GTYSQVQCHSYTGYCWCVTPNGRPISGTAVAHKTPRCPGSVNEKLPQREGTGKT corresponding to amino acids 1-170 of SMO2_HUMAN (SEQ ID NO:624), which also corresponds to amino acids 1-170 of Z44808_PEA_{—}1_P11 (SEQ ID NO:559), and a second amino acid sequence being at least 90% homologous to DIASRYPTLWTEQVKSRQNKTNKNSVSSCDQEHQSALEEAKQPKNDNVVIPECAHGGL YKPVQCHPSTGYCWCVLVDTGRPIPGTSTRYEQPKCDNTARAHPAKARDLYKGRQLQ GCPGAKKHEFLTSVLDALSTDMVHAASDPSSSSGRLSEPDPSHTLEERVVHWYFKLLD KNSSGDIGKKEIKPFKRFLRKKSKPKKCVKKFVEYCDVNNDKSISVQELMGCLGVAKE DGKADTKKRHTPRGHAESTSNRQPRKQG corresponding to amino acids 188-446 of SMO2_HUMAN (SEQ ID NO:624), which also corresponds to amino acids 171-429 of Z44808_PEA_{—}1_P11 (SEQ ID NO:559), wherein said first and second amino acid sequences are contiguous and in a sequential order.

[1479] 2. An isolated chimeric polypeptide encoding for an edge portion of Z44808_PEA_{—}1_P11 (SEQ ID NO:559), comprising a polypeptide having a length “n”, wherein n is at least about 10 amino acids in length, optionally at least about 20 amino acids in length, preferably at least about 30 amino acids in length, more preferably at least about 40 amino acids in length and most preferably at least about 50 amino acids in length, wherein at least two amino acids comprise TD, having a structure as follows: a sequence starting from any of amino acid numbers 170−x to 170; and ending at any of amino acid numbers 171+((n−2)−x), in which x varies from 0 to n−2.

[1480] The location of the variant protein was determined according to results from a number of different software programs and analyses, including analyses from SignalP and other specialized programs. The variant protein is believed to be located as follows with regard to the cell: secreted. The protein localization is believed to be secreted because both signal-peptide prediction programs predict that this protein has a signal peptide, and neither trans-membrane region prediction program predicts that this protein has a trans-membrane region.

[1481] Variant protein Z44808_PEA_{—}1_P11 (SEQ ID NO:559) also has the following non-silent SNPs (Single Nucleotide Polymorphisms) as listed in Table 12, (given according to their position(s) on the amino acid sequence, with the alternative amino acid(s) listed; the last column indicates whether the SNP is known or not; the presence of known SNPs in variant protein Z44808_PEA_{—}1_P11 (SEQ ID NO:559) sequence provides support for the deduced sequence of this variant protein according to the present invention).

[1482] Variant protein Z44808_PEA_{—}1_P11 (SEQ ID NO:559) is encoded by the following transcript(s): Z44808_PEA_{—}1_T11 (SEQ ID NO:23), for which the sequence(s) is/are given at the end of the application. The coding portion of transcript Z44808_PEA_{—}1_T11 (SEQ ID NO:23) is shown in bold; this coding portion starts at position 586 and ends at position 1872. The transcript also has the following SNPs as listed in Table 13 (given according to their position on the nucleotide sequence, with the alternative nucleic acid listed; the last column indicates whether the SNP is known or not; the presence of known SNPs in variant protein Z44808_PEA_{—}1_P11 (SEQ ID NO:559) sequence provides support for the deduced sequence of this variant protein according to the present invention).

[1483] As noted above, cluster Z44808 features 21 segment(s), which were listed in Table 2 above and for which the sequence(s) are given at the end of the application. These segment(s) are portions of nucleic acid sequence(s) which are described herein separately because they are of particular interest. A description of each segment according to the present invention is now provided.

[1484] Segment cluster Z44808_PEA_{—}1_node_{—}0 (SEQ ID NO:220) according to the present invention is supported by 29 libraries. The number of libraries was determined as previously described. This segment can be found in the following transcript(s): Z44808_PEA_{—}1_T11 (SEQ ID NO:23), Z44808_PEA_{—}1_T4 (SEQ ID NO:24, Z44808_PEA_{—}1_T5 (SEQ ID NO:25) Z44808_PEA_{—}1_T8 (SEQ ID NO:26) and Z44808_PEA_{—}1_T9 (SEQ ID NO:27). Table 14 below describes the starting and ending position of this segment on each transcript.

[1485] Segment cluster Z44808_PEA_{—}1_node_{—}16 (SEQ ID NO:221) according to the present invention is supported by 39 libraries. The number of libraries was determined as previously described. This segment can be found in the following transcript(s): Z44808_PEA_{—}1_T11 (SEQ ID NO:23), Z44808_PEA_{—}1_T4 (SEQ ID NO:24, Z44808_PEA_{—}1_T5 (SEQ ID NO:25), Z44808_PEA_{—}1_T8 (SEQ ID NO:26) and Z44808_PEA_{—}1_T9 (SEQ ID NO:27). Table 15 below describes the starting and ending position of this segment on each transcript.

[1486] Segment cluster Z44808_PEA_{—}1_node_{—}2 (SEQ ID NO:222) according to the present invention is supported by 34 libraries. The number of libraries was determined as previously described. This segment can be found in the following transcript(s): Z44808_PEA_{—}1_T11 (SEQ ID NO:23), Z44808_PEA_{—}1_T4 (SEQ ID NO:24), Z44808_PEA_{—}1_T5 (SEQ ID NO:25) Z44808_PEA_{—}1_T8 (SEQ ID NO:26) and Z44808_PEA_{—}1_T9 (SEQ ID NO:27). Table 16 below describes the starting and ending position of this segment on each transcript.

[1487] Segment cluster Z44808_PEA_{—}1_node_{—}24 (SEQ ID NO:223) according to the present invention is supported by 52 libraries. The number of libraries was determined as previously described. This segment can be found in the following transcript(s): Z44808_PEA_{—}1_T11 (SEQ ID NO:23), Z44808_PEA_{—}1_T4 (SEQ ID NO:24), Z44808_PEA_{—}1_T5 (SEQ ID NO:25) Z44808_PEA_{—}1_T8 (SEQ ID NO:26) and Z44808_PEA_{—}1_T9 (SEQ ID NO:27). Table 17 below describes the starting and ending position of this segment on each transcript.

[1488] Segment cluster Z44808_PEA_{—}1_node_{—}32 (SEQ ID NO:224) according to the present invention is supported by 17 libraries. The number of libraries was determined as previously described. This segment can be found in the following transcript(s): Z44808_PEA_{—}1_T4 (SEQ ID NO:24) and Z44808_PEA_{—}1_T8 (SEQ ID NO:26). Table 18 below describes the starting and ending position of this segment on each transcript.

[1489] Segment cluster Z44808_PEA_{—}1_node_{—}33 (SEQ ID NO:225) according to the present invention is supported by 133 libraries. The number of libraries was determined as previously described. This segment can be found in the following transcript(s): Z44808_PEA_{—}1_T11 (SEQ ID NO:23), Z44808_PEA_{—}1_T4 (SEQ ID NO:24) and Z44808_PEA_{—}1_T5 (SEQ ID NO:25). Table 20 below describes the starting and ending position of this segment on each transcript.

[1490] Segment cluster Z44808_PEA_{—}1_node_{—}36 (SEQ ID NO:226) according to the present invention is supported by 117 libraries. The number of libraries was determined as previously described. This segment can be found in the following transcript(s): Z44808_PEA_{—}1_T11 (SEQ ID NO:23, Z44808_PEA_{—}1_T4 (SEQ ID NO:24) and Z44808_PEA_{—}1_T5 (SEQ ID NO:25). Table 21 below describes the starting and ending position of this segment on each transcript.

[1491] Segment cluster Z44808_PEA_{—}1_node_{—}37 (SEQ ID NO:227) according to the present invention is supported by 120 libraries. The number of libraries was determined as previously described. This segment can be found in the following transcript(s): Z44808_PEA_{—}1_T11 (SEQ ID NO:23, Z44808_PEA_{—}1_T4 (SEQ ID NO:24) and Z44808_PEA_{—}1_T5 (SEQ ID NO:25). Table 22 below describes the starting and ending position of this segment on each transcript.

[1492] Segment cluster Z44808_PEA_{—}1_node_{—}41 (SEQ ID NO:228) according to the present invention is supported by 2 libraries. The number of libraries was determined as previously described. This segment can be found in the following transcript(s): Z44808_PEA_{—}1_T9 (SEQ ID NO:27). Table 23 below describes the starting and ending position of this segment on each transcript.

[1493] According to an optional embodiment of the present invention, short segments related to the above cluster are also provided. These segments are up to about 120 bp in length, and so are included in a separate description.

[1494] Segment cluster Z44808_PEA_{—}1_node_{—}11 (SEQ ID NO:229) according to the present invention is supported by 25 libraries. The number of libraries was determined as previously described. This segment can be found in the following transcript(s): Z44808_PEA_{—}1_T4 (SEQ ID NO:24, Z44808_PEA_{—}1_T5 (SEQ ID NO:25, Z44808_PEA_{—}1_T8 (SEQ ID NO:26) and Z44808_PEA_{—}1_T9 (SEQ ID NO:27). Table 24 below describes the starting and ending position of this segment on each transcript.

[1495] Segment cluster Z44808_PEA_{—}1_node_{—}13 (SEQ ID NO:230) according to the present invention is supported by 28 libraries. The number of libraries was determined as previously described. This segment can be found in the following transcript(s): Z44808_PEA_{—}1_T1 (SEQ ID NO:23), Z44808_PEA_{—}1_T4 (SEQ ID NO:24), Z44808_PEA_{—}1_T5 (SEQ ID NO:25) Z44808_PEA_{—}1_T8 (SEQ ID NO:26) and Z44808_PEA_{—}1_T9 (SEQ ID NO:27). Table 25 below describes the starting and ending position of this segment on each transcript.

[1496] Segment cluster Z44808_PEA_{—}1_node_{—}18 (SEQ ID NO:231) according to the present invention is supported by 27 libraries. The number of libraries was determined as previously described. This segment can be found in the following transcript(s): Z44808_PEA_{—}1_T11 (SEQ ID NO:23), Z44808_PEA_{—}1_T4 (SEQ ID NO:24), Z44808_PEA_{—}1_T5 (SEQ ID NO:25) Z44808_PEA_{—}1_T8 (SEQ ID NO:26) and Z44808_PEA_{—}1_T9 (SEQ ID NO:27). Table 26 below describes the starting and ending position of this segment on each transcript.

[1497] Segment cluster Z44808_PEA_{—}1_node_{—}22 (SEQ ID NO:232) according to the present invention is supported by 33 libraries. The number of libraries was determined as previously described. This segment can be found in the following transcript(s): Z44808_PEA_{—}1_T11 (SEQ ID NO:23), Z44808_PEA_{—}1_T4 (SEQ ID NO:24), Z44808_PEA_{—}1_T5 (SEQ ID NO:25) Z44808_PEA_{—}1_T8 (SEQ ID NO:26) and Z44808_PEA_{—}1_T9 (SEQ ID NO:27). Table 27 below describes the starting and ending position of this segment on each transcript.

[1498] Microarray (chip) data is also available for this segment as follows. As described above with regard to the cluster itself, various oligonucleotides were tested for being differentially expressed in various disease conditions, particularly cancer. The following oligonucleotides were found to hit this segment, shown in Table 28.

[1499] Segment cluster Z44808_PEA_{—}1_node_{—}26 (SEQ ID NO:233) according to the present invention is supported by 2 libraries. The number of libraries was determined as previously described. This segment can be found in the following transcript(s): Z44808_PEA_{—}1_T5 (SEQ ID NO:25). Table 29 below describes the starting and ending position of this segment on each transcript.

[1500] Segment cluster Z44808_PEA_{—}1_node_{—}30 (SEQ ID NO:234) according to the present invention is supported by 44 libraries. The number of libraries was determined as previously described. This segment can be found in the following transcript(s): Z44808_PEA_{—}1_T11 (SEQ ID NO:23), Z44808_PEA_{—}1_T4 (SEQ ID NO:24), Z44808_PEA_{—}1_T5 (SEQ ID NO:25) Z44808_PEA_{—}1_T8 (SEQ ID NO:26) and Z44808_PEA_{—}1_T9 (SEQ ID NO:27). Table 31 below describes the starting and ending position of this segment on each transcript.

[1501] Segment cluster Z44808_PEA_{—}1_node_{—}34 (SEQ ID NO:235) according to the present invention is supported by 70 libraries. The number of libraries was determined as previously described. This segment can be found in the following transcript(s): Z44808_PEA_L_T11 (SEQ ID NO:23), Z44808_PEA_{—}1_T4 (SEQ ID NO:24) and Z44808_PEA_{—}1_T5 (SEQ ID NO:25). Table 32 below describes the starting and ending position of this segment on each transcript.

[1502] Segment cluster Z44808_PEA_{—}1_node_{—}35 (SEQ ID NO:236) according to the present invention can be found in the following transcript(s): Z44808_PEA_{—}1_T11 (SEQ ID NO:23, Z44808_PEA_{—}1_T4 (SEQ ID NO:24) and Z44808_PEA_{—}1_T5 (SEQ ID NO:25). Table 33 below describes the starting and ending position of this segment on each transcript.

[1503] Segment cluster Z44808_PEA_{—}1_node_{—}39 (SEQ ID NO:237) according to the present invention is supported by 1 libraries. The number of libraries was determined as previously described. This segment can be found in the following transcript(s): Z44808_PEA_{—}1_T9 (SEQ ID NO:27). Table 34 below describes the starting and ending position of this segment on each transcript.

[1504] Segment cluster Z44808_PEA_{—}1_node_{—}4 (SEQ ID NO:238) according to the present invention is supported by 33 libraries. The number of libraries was determined as previously described. This segment can be found in the following transcript(s): Z44808_PEA_{—}1_T11 (SEQ ID NO:23), Z44808_PEA_{—}1_T4 (SEQ ID NO:24), Z44808_PEA_{—}1_T5 (SEQ ID NO:25) Z44808_PEA_{—}1_T8 (SEQ ID NO:26) and Z44808_PEA_{—}1_T9 (SEQ ID NO:27). Table 35 below describes the starting and ending position of this segment on each transcript.

[1505] Segment cluster Z44808_PEA_{—}1_node_{—}6 (SEQ ID NO:239) according to the present invention is supported by 30 libraries. The number of libraries was determined as previously described. This segment can be found in the following transcript(s): Z44808_PEA_{—}1_T11 (SEQ ID NO:23), Z44808_PEA_{—}1_T4 (SEQ ID NO:24, Z44808_PEA_{—}1_T5 (SEQ ID NO:25), Z44808_PEA_{—}1_T8 (SEQ ID NO:26) and Z44808_PEA_{—}1_T9 (SEQ ID NO:27). Table 36 below describes the starting and ending position of this segment on each transcript.

[1506] Segment cluster Z44808_PEA_{—}1_node_{—}8 (SEQ ID NO:240) according to the present invention is supported by 25 libraries. The number of libraries was determined as previously described. This segment can be found in the following transcript(s): Z44808_PEA_{—}1_T11 (SEQ ID NO:23), Z44808_PEA_{—}1_T4 (SEQ ID NO:24), Z44808_PEA_{—}1_T5 (SEQ ID NO:25), Z44808_PEA_{—}1_T8 (SEQ ID NO:26) and Z44808_PEA_{—}1_T9 (SEQ ID NO:27). Table 37 below describes the starting and ending position of this segment on each transcript.

Variant protein alignment to the previously known protein:

Sequence name: /tmp/vUqLu6eAVZ/K3JDuPvaLo:SMO2_HUMAN (SEQ ID NO:624)

Sequence Documentation:

Alignment of: Z44808_PEA_{—}1_P5 (SEQ ID NO:556)×SMO2_HUMAN (SEQ ID NO:624) ••

Alignment segment 1/1:

Alignment:

Sequence name: /tmp/QSUNfTsJ5y/kLOw5Vb6SD:SMO2_HUMAN (SEQ ID NO:624)

Sequence Documentation:

Alignment of: Z44808_PEA_{—}1_P6 (SEQ ID NO:557)×SMO2_HUMAN (SEQ ID NO:624) ••

Alignment segment 1/1:

Alignment:

Sequence name: /tmp/MZVdR4PVdM/5uN8RwViJ1:SMO2_HUMAN (SEQ ID NO:624)

Sequence Documentation:

Alignment of: Z44808_PEA_{—}1_P7 (SEQ ID NO:558)×SMO2_HUMAN (SEQ ID NO:624) ••

Alignment segment 1/1:

Alignment:

Sequence name: /tmp/3fGVxqLloe/J5mQduAd0F:SMO2_HUMAN (SEQ ID NO:624)

Sequence Documentation:

Alignment of: Z44808_PEA_{—}1_P11 (SEQ ID NO:559)×SMO2_HUMAN (SEQ ID NO:624) ••

Alignment segment 1/1:

Alignment:

[1507] Expression of SMO2_HUMAN SPARC related modular calcium-binding protein 2 precursor (Secreted modular calcium-binding protein 2) (SMOC-2) (Smooth muscle-associated protein 2) Z44808 transcripts which are detectable by amplicon as depicted in sequence name Z44808junc8-11 (SEQ ID NO:1291) in normal and cancerous colon tissues

[1508] Expression of SMO2_HUMAN SPARC related modular calcium-binding protein 2 precursor (Secreted modular calcium-binding protein 2) (SMOC-2) (Smooth muscle-associated protein 2) transcripts detectable by or according to junc8-11, Z44808junc8-11 amplicon (SEQ ID NO:1291) and primers Z44808junc8-1° F. (SEQ ID NO:1289) and Z44808junc8-11R (SEQ ID NO:1290) was measured by real time PCR. In parallel the expression of four housekeeping genes—PBGD (GenBank Accession No. BC019323 (SEQ ID NO:1576); amplicon—PBGD-amplicon, SEQ ID NO:531), HPRT1 (GenBank Accession No. NM_{—}000194 (SEQ ID NO:1577); amplicon—HPRT1-amplicon, SEQ ID NO:612), G6PD (GenBank Accession No. NM_{—}000402 (SEQ ID NO:1578); G6PD amplicon, SEQ ID NO:615), RPS27A (GenBank Accession No. NM_{—}002954 (SEQ ID NO:1579); RPS27A amplicon, SEQ ID NO:1261) was measured similarly. For each RT sample, the expression of the above amplicon was normalized to the geometric mean of the quantities of the housekeeping genes. The normalized quantity of each RT sample was then divided by the median of the quantities of the normal post-mortem (PM) samples (Sample Nos. 41, 52, 62-67, 69-71, Table 1, above, “Tissue samples in testing panel”), to obtain a value of fold up-regulation for each sample relative to median of the normal PM samples.

[1509] FIG. 32 is a histogram showing over expression of the above-indicated SMO2_HUMAN SPARC related modular calcium-binding protein 2 precursor (Secreted modular calcium-binding protein 2) (SMOC-2) (Smooth muscle-associated protein 2) transcripts in cancerous colon samples relative to the normal samples.

[1510] As is evident from FIG. 32, the expression of SMO2_HUMAN SPARC related modular calcium-binding protein 2 precursor (Secreted modular calcium-binding protein 2) (SMOC-2) (Smooth muscle-associated protein 2) transcripts detectable by the above amplicon in cancer samples was higher in a few samples than in the non-cancerous samples (Sample Nos. 41, 52, 62-67, 69-71, Table 1, above, “Tissue samples in testing panel”). Notably an over-expression of at least 5 fold was found in 4 out of 36 adenocarcinoma samples.

[1511] Primer pairs are also optionally and preferably encompassed within the present invention; for example, for the above experiment, the following primer pair was used as a non-limiting illustrative example only of a suitable primer pair: Z44808junc8-11F forward primer (SEQ ID NO:1289); and Z44808junc8-11R reverse primer (SEQ ID NO:1290).

[1512] The present invention also preferably encompasses any amplicon obtained through the use of any suitable primer pair; for example, for the above experiment, the following amplicon was obtained as a non-limiting illustrative example only of a suitable amplicon: Z44808junc8-11 (SEQ ID NO:1291).

[1513] Expression of SMO2_HUMAN SPARC related modular calcium-binding protein 2 precursor (Secreted modular calcium-binding protein 2) (SMOC-2) (Smooth muscle-associated protein 2) Z44808 transcripts which are detectable by amplicon as depicted in sequence name Z44808 junc8-11 (SEQ ID NO:1291) in different normal tissues

[1514] Expression of SMO2_HUMAN SPARC related modular calcium-binding protein 2 precursor (Secreted modular calcium-binding protein 2) (SMOC-2) (Smooth muscle-associated protein 2) transcripts detectable by or according to Z44808junc8-11 amplicon (SEQ ID NO:1291) and primers: Z44808junc8-11F (SEQ ID NO:1289) and Z44808junc8-11R (SEQ ID NO:1290) was measured by real time PCR. In parallel the expression of four housekeeping genes—RPL19 (GenBank Accession No. NM_{—}000981 (SEQ ID NO:1580); RPL19 amplicon, SEQ ID NO:1264), TATA box (GenBank Accession No. NM_{—}003194 (SEQ ID NO:1581); TATA amplicon, SEQ ID NO:1267), Ubiquitin (GenBank Accession No. BC000449 (SEQ ID NO:1582); amplicon—Ubiquitin-amplicon) and SDHA (GenBank Accession No. NM_{—}004168 (SEQ ID NO:1583); amplicon—SDHA-amplicon, SEQ ID NO:1273) was measured similarly. For each RT sample, the expression of the above amplicon was normalized to the geometric mean of the quantities of the housekeeping genes. The normalized quantity of each RT sample was then divided by the median of the quantities of the ovary samples (Sample Nos. 18-20, Table 2, “Tissue samples in normal panel”), to obtain a value of relative expression of each sample relative to median of the ovary samples.

[1515] The results are shown in FIG. 39, demonstrating the expression of SMO2_HUMAN SPARC related modular calcium-binding protein 2 precursor (Secreted modular calcium-binding protein 2) (SMOC-2) (Smooth muscle-associated protein 2) Z44808 transcripts which are detectable by amplicon as depicted in sequence name Z44808 junc8-11 (SEQ ID NO:1291) in different normal tissues.

Description for Cluster Z25299

[1516] Cluster Z25299 features 5 transcript(s) and 11 segment(s) of interest, the names for which are given in Tables 1 and 2, respectively, the sequences themselves are given at the end of the application. The selected protein variants are given in table 3.

[1517] These sequences are variants of the known protein Antileukoproteinase 1 precursor (SwissProt accession identifier ALK1_HUMAN; known also according to the synonyms ALP; HUSI-1; Seminal proteinase inhibitor; Secretory leukocyte protease inhibitor; BLPI; Mucus proteinase inhibitor; MPI; WAP four-disulfide core domain protein 4; Protease inhibitor WAP4), SEQ ID NO: 625, referred to herein as the previously known protein.

[1518] Protein Antileukoproteinase 1 precursor (SEQ ID NO:625) is known or believed to have the following function(s): Acid-stable proteinase inhibitor with strong affinities for trypsin, chymotrypsin, elastase, and cathepsin G. May prevent elastase-mediated damage to oral and possibly other mucosal tissues. The sequence for protein Antileukoproteinase 1 precursor is given at the end of the application, as “Antileukoproteinase 1 precursor amino acid sequence”. Protein Antileukoproteinase 1 precursor localization is believed to be Secreted.

[1519] It has been investigated for clinical/therapeutic use in humans, for example as a target for an antibody or small molecule, and/or as a direct therapeutic; available information related to these investigations is as follows. Potential pharmaceutically related or therapeutically related activity or activities of the previously known protein are as follows: Elastase inhibitor; Tryptase inhibitor. A therapeutic role for a protein represented by the cluster has been predicted. The cluster was assigned this field because there was information in the drug database or the public databases (e.g., described herein above) that this protein, or part thereof, is used or can be used for a potential therapeutic indication: Anti-inflammatory; Antiasthma.

[1520] The following GO Annotation(s) apply to the previously known protein. The following annotation(s) were found: proteinase inhibitor; serine protease inhibitor, which are annotation(s) related to Molecular Function.

[1521] The GO assignment relies on information from one or more of the SwissProt/TremB1 Protein knowledgebase, available from <http://www.expasy.ch/sprot/>; or Locuslink, available from <http://www.ncbi.nlm.nih.gov/projects/LocusLink/>.

[1522] Cluster Z25299 can be used as a diagnostic marker according to overexpression of transcripts of this cluster in cancer. Expression of such transcripts in normal tissues is also given according to the previously described methods. The term “number” in the left hand column of the table and the numbers on the y-axis of the figure below refer to weighted expression of ESTs in each category, as “parts per million” (ratio of the expression of ESTs for a particular cluster to the expression of all ESTs in that category, according to parts per million).

[1523] Overall, the following results were obtained as shown with regard to the histograms in FIG. 20 and Table 4. This cluster is overexpressed (at least at a minimum level) in the following pathological conditions: brain malignant tumors, a mixture of malignant tumors from different tissues and ovarian carcinoma.

[1524] As noted above, cluster Z25299 features 5 transcript(s), which were listed in Table 1 above. These transcript(s) encode for protein(s) which are variant(s) of protein Antileukoproteinase 1 precursor (SEQ ID NO:625). A description of each variant protein according to the present invention is now provided.

[1525] Variant protein Z25299_PEA_{—}2_P2 (SEQ ID NO:560) according to the present invention has an amino acid sequence as given at the end of the application; it is encoded by transcript(s) Z25299_PEA_{—}2_T1 (SEQ ID NO:28). An alignment is given to the known protein (Antileukoproteinase 1 precursor (SEQ ID NO:625)) at the end of the application. One or more alignments to one or more previously published protein sequences are given at the end of the application. A brief description of the relationship of the variant protein according to the present invention to each such aligned protein is as follows:

[1526] Comparison report between Z25299_PEA_{—}2_P2 (SEQ ID NO:560) and ALK1_HUMAN (SEQ ID NO:625):

[1527] 1. An isolated chimeric polypeptide encoding for Z25299_PEA_{—}2_P2 (SEQ ID NO:560), comprising a first amino acid sequence being at least 90% homologous to MKSSGLFPFLVLLALGTLAPWAVEGSGKSFKAGVCPPKKSAQCLRYKKPECQSDWQCP GKKRCCPDTCGIKCLDPVDTPNPTRRKPGKCPVTYGQCLMLNPPNFCEMDGQCKRDLK CCMGMCGKSCVSPVK corresponding to amino acids 1-131 of ALK1_HUMAN (SEQ ID NO:625), which also corresponds to amino acids 1-131 of Z25299_PEA_{—}2_P2 (SEQ ID NO:560), and a second amino acid sequence being at least 70%, optionally at least 80%, preferably at least 85%, more preferably at least 90% and most preferably at least 95% homologous to a polypeptide having the sequence GKQGMRAH (SEQ ID NO:1503) corresponding to amino acids 132-139 of Z25299_PEA_{—}2_P2 (SEQ ID NO:560), wherein said first and second amino acid sequences are contiguous and in a sequential order.

[1528] 2. An isolated polypeptide encoding for a tail of Z25299_PEA_{—}2_P2 (SEQ ID NO:560), comprising a polypeptide being at least 70%, optionally at least about 80%, preferably at least about 85%, more preferably at least about 90% and most preferably at least about 95% homologous to the sequence GKQGMRAH (SEQ ID NO:1503) in Z25299_PEA_{—}2_P2 (SEQ ID NO:560).

[1529] The location of the variant protein was determined according to results from a number of different software programs and analyses, including analyses from SignalP and other specialized programs. The variant protein is believed to be located as follows with regard to the cell: secreted. The protein localization is believed to be secreted because both signal-peptide prediction programs predict that this protein has a signal peptide, and neither trans-membrane region prediction program predicts that this protein has a trans-membrane region.

[1530] Variant protein Z25299_PEA_{—}2_P2 (SEQ ID NO:560) also has the following non-silent SNPs (Single Nucleotide Polymorphisms) as listed in Table 6, (given according to their position(s) on the amino acid sequence, with the alternative amino acid(s) listed; the last column indicates whether the SNP is known or not; the presence of known SNPs in variant protein Z25299_PEA_{—}2_P2 (SEQ ID NO:560) sequence provides support for the deduced sequence of this variant protein according to the present invention).

[1531] Variant protein Z25299_PEA_{—}2_P2 (SEQ ID NO:560) is encoded by the following transcript(s): Z25299_PEA_{—}2_T1 (SEQ ID NO:28), for which the sequence(s) is/are given at the end of the application. The coding portion of transcript Z25299_PEA_{—}2_T1 (SEQ ID NO:28) is shown in bold; this coding portion starts at position 124 and ends at position 540. The transcript also has the following SNPs as listed in Table 7 (given according to their position on the nucleotide sequence, with the alternative nucleic acid listed; the last column indicates whether the SNP is known or not; the presence of known SNPs in variant protein Z25299_PEA_{—}2_P2 (SEQ ID NO:560) sequence provides support for the deduced sequence of this variant protein according to the present invention).

[1532] Variant protein Z25299_PEA_{—}2_P3 (SEQ ID NO:561) according to the present invention has an amino acid sequence as given at the end of the application; it is encoded by transcript(s) Z25299_PEA_{—}2_T2 (SEQ ID NO:29). An alignment is given to the known protein (Antileukoproteinase 1 precursor (SEQ ID NO:625)) at the end of the application. One or more alignments to one or more previously published protein sequences are given at the end of the application. A brief description of the relationship of the variant protein according to the present invention to each such aligned protein is as follows:

[1533] Comparison report between Z25299_PEA_{—}2_P3 (SEQ ID NO:561) and ALK1_HUMAN SEQ ID NO:625):

[1534] 1. An isolated chimeric polypeptide encoding for Z25299_PEA_{—}2_P3 (SEQ ID NO:561), comprising a first amino acid sequence being at least 90% homologous to MKSSGLFPFLVLLALGTLAPWAVEGSGKSFKAGVCPPKKSAQCLRYKKPECQSDWQCP GKKRCCPDTCGIKCLDPVDTPNPTRRKPGKCPVTYGQCLMLNPPNFCEMDGQCKRDLK CCMGMCGKSCVSPVK corresponding to amino acids 1-131 of ALK1_HUMAN (SEQ ID NO:625), which also corresponds to amino acids 1-131 of Z25299_PEA_{—}2_P3 (SEQ ID NO:561), and a second amino acid sequence being at least 70%, optionally at least 80%, preferably at least 85%, more preferably at least 90% and most preferably at least 95% homologous to a polypeptide having the sequence GEKRHHKQLRDQEVDPLEMRRHSAG (SEQ ID NO:1504) corresponding to amino acids 132-156 of Z25299_PEA_{—}2_P3 (SEQ ID NO:561), wherein said first and second amino acid sequences are contiguous and in a sequential order.

[1535] 2. An isolated polypeptide encoding for a tail of Z25299_PEA_{—}2_P3 (SEQ ID NO:561), comprising a polypeptide being at least 70%, optionally at least about 80%, preferably at least about 85%, more preferably at least about 90% and most preferably at least about 95% homologous to the sequence GEKRHHKQLRDQEVDPLEMRRHSAG (SEQ ID NO:1504) in Z25299_PEA_{—}2_P3 (SEQ ID NO:561).

[1536] The location of the variant protein was determined according to results from a number of different software programs and analyses, including analyses from SignalP and other specialized programs. The variant protein is believed to be located as follows with regard to the cell: secreted. The protein localization is believed to be secreted because both signal-peptide prediction programs predict that this protein has a signal peptide, and neither trans-membrane region prediction program predicts that this protein has a trans-membrane region.

[1537] Variant protein Z25299_PEA_{—}2_P3 (SEQ ID NO:561) also has the following non-silent SNPs (Single Nucleotide Polymorphisms) as listed in Table 8, (given according to their position(s) on the amino acid sequence, with the alternative amino acid(s) listed; the last column indicates whether the SNP is known or not; the presence of known SNPs in variant protein Z25299_PEA_{—}2_P3 (SEQ ID NO:561) sequence provides support for the deduced sequence of this variant protein according to the present invention).

[1538] Variant protein Z25299_PEA_{—}2_P3 (SEQ ID NO:561) is encoded by the following transcript(s): Z25299_PEA_{—}2_T2 (SEQ ID NO:29), for which the sequence(s) is/are given at the end of the application. The coding portion of transcript Z25299_PEA_{—}2_T2 (SEQ ID NO:29) is shown in bold; this coding portion starts at position 124 and ends at position 591. The transcript also has the following SNPs as listed in Table 9 (given according to their position on the nucleotide sequence, with the alternative nucleic acid listed; the last column indicates whether the SNP is known or not; the presence of known SNPs in variant protein Z25299_PEA_{—}2_P3 (SEQ ID NO:561) sequence provides support for the deduced sequence of this variant protein according to the present invention).

[1539] Variant protein Z25299_PEA_{—}2_P7 (SEQ ID NO:562) according to the present invention has an amino acid sequence as given at the end of the application; it is encoded by transcript(s) Z25299_PEA_{—}2_T6 (SEQ ID NO:31). An alignment is given to the known protein (Antileukoproteinase 1 precursor (SEQ ID NO:625)) at the end of the application. One or more alignments to one or more previously published protein sequences are given at the end of the application. A brief description of the relationship of the variant protein according to the present invention to each such aligned protein is as follows:

[1540] Comparison report between Z25299_PEA_{—}2_P7 (SEQ ID NO:562) and ALK1_HUMAN (SEQ ID NO:625):

[1541] 1. An isolated chimeric polypeptide encoding for Z25299_PEA_{—}2_P7 (SEQ ID NO:562), comprising a first amino acid sequence being at least 90% homologous to MKSSGLFPFLVLLALGTLAPWAVEGSGKSFKAGVCPPKKSAQCLRYKKPECQSDWQCP GKKRCCPDTCGIKCLDPVDTPNP corresponding to amino acids 1-81 of ALK1_HUMAN (SEQ ID NO:625), which also corresponds to amino acids 1-81 of Z25299_PEA_{—}2_P7 (SEQ ID NO:562), and a second amino acid sequence being at least 70%, optionally at least 80%, preferably at least 85%, more preferably at least 90% and most preferably at least 95% homologous to a polypeptide having the sequence RGSLGSAQ (SEQ ID NO:1505) corresponding to amino acids 82-89 of Z25299_PEA_{—}2_P7 (SEQ ID NO:562), wherein said first and second amino acid sequences are contiguous and in a sequential order.

[1542] 2. An isolated polypeptide encoding for a tail of Z25299_PEA_{—}2_P7 (SEQ ID NO:562), comprising a polypeptide being at least 70%, optionally at least about 80%, preferably at least about 85%, more preferably at least about 90% and most preferably at least about 95% homologous to the sequence RGSLGSAQ (SEQ ID NO:1505) in Z25299_PEA_{—}2_P7 (SEQ ID NO:562).

[1543] The location of the variant protein was determined according to results from a number of different software programs and analyses, including analyses from SignalP and other specialized programs. The variant protein is believed to be located as follows with regard to the cell: secreted. The protein localization is believed to be secreted because both signal-peptide prediction programs predict that this protein has a signal peptide, and neither trans-membrane region prediction program predicts that this protein has a trans-membrane region.

[1544] Variant protein Z25299_PEA_{—}2_P7 (SEQ ID NO:562) also has the following non-silent SNPs (Single Nucleotide Polymorphisms) as listed in Table 10, (given according to their position(s) on the amino acid sequence, with the alternative amino acid(s) listed; the last column indicates whether the SNP is known or not; the presence of known SNPs in variant protein Z25299_PEA_{—}2_P7 (SEQ ID NO:562) sequence provides support for the deduced sequence of this variant protein according to the present invention).

[1545] Variant protein Z25299_PEA_{—}2_P7 (SEQ ID NO:562) is encoded by the following transcript(s): Z25299_PEA_{—}2_T6 (SEQ ID NO:31), for which the sequence(s) is/are given at the end of the application. The coding portion of transcript Z25299_PEA_{—}2_T6 (SEQ ID NO:31) is shown in bold; this coding portion starts at position 124 and ends at position 390. The transcript also has the following SNPs as listed in Table 11 (given according to their position on the nucleotide sequence, with the alternative nucleic acid listed; the last column indicates whether the SNP is known or not; the presence of known SNPs in variant protein Z25299_PEA_{—}2_P7 (SEQ ID NO:562) sequence provides support for the deduced sequence of this variant protein according to the present invention).

[1546] Variant protein Z25299_PEA_{—}2_P10 (SEQ ID NO:563) according to the present invention has an amino acid sequence as given at the end of the application; it is encoded by transcript(s) Z25299_PEA_{—}2_T9 (SEQ ID NO:32). An alignment is given to the known protein (Antileukoproteinase 1 precursor (SEQ ID NO:625)) at the end of the application. One or more alignments to one or more previously published protein sequences are given at the end of the application. A brief description of the relationship of the variant protein according to the present invention to each such aligned protein is as follows:

[1547] Comparison report between Z25299_PEA_{—}2_P10 (SEQ ID NO:563) and ALK1_HUMAN (SEQ ID NO:625):

[1548] 1. An isolated chimeric polypeptide encoding for Z25299_PEA_{—}2_P10 (SEQ ID NO:563) comprising a first amino acid sequence being at least 90% homologous to MKSSGLFPFLVLLALGTLAPWAVEGSGKSFKAGVCPPKKSAQCLRYKKPECQSDWQCP GKKRCCPDTCGIKCLDPVDTPNPT corresponding to amino acids 1-82 of ALK1_HUMAN (SEQ ID NO:625), which also corresponds to amino acids 1-82 of Z25299_PEA_{—}2_P10 (SEQ ID NO:563).

[1549] The location of the variant protein was determined according to results from a number of different software programs and analyses, including analyses from SignalP and other specialized programs. The variant protein is believed to be located as follows with regard to the cell: secreted. The protein localization is believed to be secreted because both signal-peptide prediction programs predict that this protein has a signal peptide, and neither trans-membrane region prediction program predicts that this protein has a trans-membrane region.

[1550] Variant protein Z25299_PEA_{—}2_P10 (SEQ ID NO:563) also has the following non-silent SNPs (Single Nucleotide Polymorphisms) as listed in Table 12, (given according to their position(s) on the amino acid sequence, with the alternative amino acid(s) listed; the last column indicates whether the SNP is known or not; the presence of known SNPs in variant protein Z25299_PEA_{—}2_P10 (SEQ ID NO:563) sequence provides support for the deduced sequence of this variant protein according to the present invention).

[1551] Variant protein Z25299_PEA_{—}2_P10 (SEQ ID NO:563) is encoded by the following transcript(s): Z25299_PEA_{—}2_T9 (SEQ ID NO:32, for which the sequence(s) is/are given at the end of the application. The coding portion of transcript Z25299_PEA_{—}2_T9 (SEQ ID NO:32) is shown in bold; this coding portion starts at position 124 and ends at position 369. The transcript also has the following SNPs as listed in Table 13 (given according to their position on the nucleotide sequence, with the alternative nucleic acid listed; the last column indicates whether the SNP is known or not; the presence of known SNPs in variant protein Z25299_PEA_{—}2_P10 (SEQ ID NO:563) sequence provides support for the deduced sequence of this variant protein according to the present invention).

[1552] As noted above, cluster Z25299 features 11 segment(s), which were listed in Table 2 above and for which the sequence(s) are given at the end of the application. These segment(s) are portions of nucleic acid sequence(s) which are described herein separately because they are of particular interest. A description of each segment according to the present invention is now provided.

[1553] Segment cluster Z25299_PEA_{—}2_node_{—}20 (SEQ ID NO:241) according to the present invention is supported by 6 libraries. The number of libraries was determined as previously described. This segment can be found in the following transcript(s): Z25299_PEA_{—}2_T1 (SEQ ID NO:28). Table 14 below describes the starting and ending position of this segment on each transcript.

[1554] Segment cluster Z25299_PEA_{—}2_node_{—}21 (SEQ ID NO:242) according to the present invention is supported by 162 libraries. The number of libraries was determined as previously described. This segment can be found in the following transcript(s): Z25299_PEA_{—}2_T1 (SEQ ID NO:28, Z25299_PEA_{—}2_T6 (SEQ ID NO:31) and Z25299_PEA_{—}2_T9 (SEQ ID NO:32). Table 15 below describes the starting and ending position of this segment on each transcript.

[1555] Segment cluster Z25299_PEA_{—}2_node_{—}23 (SEQ ID NO:243) according to the present invention is supported by 2 libraries. The number of libraries was determined as previously described. This segment can be found in the following transcript(s): Z25299_PEA_{—}2_T2 (SEQ ID NO:29). Table 16 below describes the starting and ending position of this segment on each transcript.

[1556] Segment cluster Z25299_PEA_{—}2_node_{—}24 (SEQ ID NO:244) according to the present invention is supported by 2 libraries. The number of libraries was determined as previously described. This segment can be found in the following transcript(s): Z25299_PEA_{—}2_T2 (SEQ ID NO:29) and Z25299_PEA_{—}2_T3 (SEQ ID NO:30). Table 17 below describes the starting and ending position of this segment on each transcript.

[1557] Segment cluster Z25299_PEA_{—}2_node_{—}8 (SEQ ID NO:245) according to the present invention is supported by 218 libraries. The number of libraries was determined as previously described. This segment can be found in the following transcript(s): Z25299_PEA_{—}2_T1 (SEQ ID NO:28), Z25299_PEA_{—}2_T2 (SEQ ID NO:29), Z25299_PEA_{—}2_T3 (SEQ ID NO:30), Z25299_PEA_{—}2_T6 (SEQ ID NO:31) and Z25299_PEA_{—}2_T9 (SEQ ID NO:32). Table 18 below describes the starting and ending position of this segment on each transcript.

[1558] According to an optional embodiment of the present invention, short segments related to the above cluster are also provided. These segments are up to about 120 bp in length, and so are included in a separate description.

[1559] Segment cluster Z25299_PEA_{—}2_node_{—}12 (SEQ ID NO:246) according to the present invention is supported by 228 libraries. The number of libraries was determined as previously described. This segment can be found in the following transcript(s): Z25299_PEA_{—}2_T1 (SEQ ID NO:28), Z25299_PEA_{—}2_T2 (SEQ ID NO:29), Z25299_PEA_{—}2_T3 (SEQ ID NO:30), Z25299_PEA_{—}2_T6 (SEQ ID NO:31) and Z25299_PEA_{—}2_T9 (SEQ ID NO:32). Table 20 below describes the starting and ending position of this segment on each transcript.

[1560] Segment cluster Z25299_PEA_{—}2_node_{—}13 (SEQ ID NO:247) according to the present invention is supported by 246 libraries. The number of libraries was determined as previously described. This segment can be found in the following transcript(s): Z25299_PEA_{—}2_T1 (SEQ ID NO:28), Z25299_PEA_{—}2_T2 (SEQ ID NO:29, Z25299_PEA_{—}2_T3 (SEQ ID NO:30) Z25299_PEA_{—}2_T6 (SEQ ID NO:31) and Z25299_PEA_{—}2_T9 (SEQ ID NO:32). Table 22 below describes the starting and ending position of this segment on each transcript.

[1561] Segment cluster Z25299_PEA_{—}2_node_{—}14 (SEQ ID NO:248) according to the present invention can be found in the following transcript(s): Z25299_PEA_{—}2_T1 (SEQ ID NO:28), Z25299_PEA_{—}2_T2 (SEQ ID NO:29), Z25299_PEA_{—}2_T3 (SEQ ID NO:30), Z25299_PEA_{—}2_T6 (SEQ ID NO:31) and Z25299_PEA_{—}2_T9 (SEQ ID NO:32). Table 23 below describes the starting and ending position of this segment on each transcript.

[1562] Segment cluster Z25299_PEA_{—}2_node_{—}17 (SEQ ID NO:249) according to the present invention can be found in the following transcript(s): Z25299_PEA_{—}2_T1 (SEQ ID NO:28), Z25299_PEA_{—}2_T2 (SEQ ID NO:29) and Z25299_PEA_{—}2_T3 (SEQ ID NO:30). Table 24 below describes the starting and ending position of this segment on each transcript.

[1563] Segment cluster Z25299_PEA_{—}2_node_{—}18 (SEQ ID NO:250) according to the present invention is supported by 221 libraries. The number of libraries was determined as previously described. This segment can be found in the following transcript(s): Z25299_PEA_{—}2_T1 (SEQ ID NO:28), Z25299_PEA_{—}2_T2 (SEQ ID NO:29), Z25299_PEA_{—}2_T3 (SEQ ID NO:30) and Z25299_PEA_{—}2_T6 (SEQ ID NO:31). Table 25 below describes the starting and ending position of this segment on each transcript.

[1564] Segment cluster Z25299_PEA_{—}2_node_{—}19 (SEQ ID NO:251) according to the present invention is supported by 197 libraries. The number of libraries was determined as previously described. This segment can be found in the following transcript(s): Z25299_PEA_{—}2_T1 (SEQ ID NO:28, Z25299_PEA_{—}2_T2 (SEQ ID NO:29, Z25299_PEA_{—}2_T3 (SEQ ID NO:30) and Z25299_PEA_{—}2_T6 (SEQ ID NO:31). Table 26 below describes the starting and ending position of this segment on each transcript.

Variant protein alignment to the previously known protein:

Sequence name: /tmp/oXgeQ4MeyL/K6Vqb1MQu2:ALK1_HUMAN (SEQ ID NO:625)

Sequence Documentation:

Alignment of: Z25299_PEA_{—}2_P2 (SEQ ID NO:560)×ALK1_HUMAN (SEQ ID NO:625) ••

Alignment segment 1/1:

Alignment:

Sequence name: /tmp/rbf314VLIm/yR43i4SbP4:ALK1_HUMAN (SEQ ID NO:625)

Sequence Documentation:

Alignment of: Z25299_PEA_{—}2_P3 (SEQ ID NO:561)×ALK1_HUMAN (SEQ ID NO:625) ••

Alignment segment 1/1:

Alignment:

Sequence name: /tmp/KCtSXACZXe/rK4T6LKeRX:ALK1_HUMAN (SEQ ID NO:625)

Sequence Documentation:

Alignment of: Z25299_PEA_{—}2_P7 (SEQ ID NO:562)×ALK1_HUMAN (SEQ ID NO:625) ••

Alignment segment 1/1:

Alignment:

Sequence name: /tmp/LcBlcAxB6c/NSI9pqfxoU:ALK1_HUMAN (SEQ ID NO:625)

Sequence Documentation:

Alignment of: Z25299_PEA_{—}2_P10 (SEQ ID NO:563)×ALK1_HUMAN (SEQ ID NO:625) ••

Alignment segment 1/1:

Alignment:

[1565] Expression of Secretory leukocyte protease inhibitor Acid-stable proteinase inhibitor with strong affinities for trypsin, chymotrypsin, elastase, and cathepsin G Z25299 transcripts, which are detectable by amplicon as depicted in sequence name Z25299 seg20 (SEQ ID NO:1294), were examined for expression in normal and cancerous colon tissues.

[1566] Transcripts detectable by or according to seg20, Z25299 seg20 amplicon (SEQ ID NO: 1294) and Z25299 seg20F (SEQ ID NO:1292) and Z25299 seg20R (SEQ ID NO:1293) primers were measured by real time PCR. In parallel the expression of four housekeeping genes—PBGD (GenBank Accession No. BC019323 (SEQ ID NO:1576); amplicon—PBGD-amplicon, SEQ ID NO:531), HPRT1 (GenBank Accession No. NM_{—}000194 (SEQ ID NO:1577); amplicon—HPRT1-amplicon, SEQ ID NO:612), G6PD (GenBank Accession No. NM_{—}000402 (SEQ ID NO:1578); HPRT1-amplicon, SEQ ID NO:615), RPS27A (GenBank Accession No. NM_{—}002954 (SEQ ID NO:1579); RPS27A amplicon, SEQ ID NO:1261), was measured similarly. For each RT sample, the expression of the above amplicon was normalized to the geometric mean of the quantities of the housekeeping genes. The normalized quantity of each RT sample was then divided by the median of the quantities of the normal post-mortem (PM) samples (Sample Nos. 41, 52, 62-67, 69-71, Table 1, above Tissue samples in testing panel), to obtain a value of fold up-regulation for each sample relative to median of the normal PM samples.

[1567] FIG. 21 is a histogram showing over expression of the above-indicated variant.

[1568] Transcript expression in cancerous colon samples relative to the normal samples are shown.

[1569] As is evident from FIG. 21, transcripts detectable by the above amplicon(s) in cancer samples were significantly higher than in the non-cancerous samples (Sample Nos. 41,52,62-67, 69-71 Table 1 Tissue samples in testing panel). Notably an over-expression of at least 5 fold was found in 7 out of 36 adenocarcinoma samples.

[1570] Statistical analysis was applied to verify the significance of these results, as described below.

The P value for the difference in the expression levels of this variant was determined.

[1571] Transcripts detectable by the above amplicon in colon cancer samples versus the normal tissue samples were determined by T test as 6.98E-02.

[1572] Threshold of 5 fold overexpression was found to differentiate between cancer and normal samples with P value of 1.33E-02 as checked by exact fisher test. The above values demonstrate statistical significance of the results.

[1573] Primer pairs are also optionally and preferably encompassed within the present invention; for example, for the above experiment, the following primer pair was used as a non-limiting illustrative example only of a suitable primer pair: Z25299 seg20F forward primer (SEQ ID NO:1292); and Z25299 seg20R reverse primer (SEQ ID NO:1293).

[1574] The present invention also preferably encompasses any amplicon obtained through the use of any suitable primer pair; for example, for the above experiment, the following amplicon was obtained as a non-limiting illustrative example only of a suitable amplicon: Z25299 seg20 (SEQ ID NO:1294).

[1575] Expression of Secretory leukocyte protease inhibitor Acid-stable proteinase inhibitor with strong affinities for trypsin, chymotrypsin, elastase, and cathepsin G. May prevent elastase-mediated damage to oral and possibly other mucosal tissues Z25299 transcripts which are detectable by amplicon as depicted in sequence name Z25299seg20 (SEQ ID NO:1294) in different normal tissues

[1576] Expression of Secretory leukocyte protease inhibitor Acid-stable proteinase inhibitor with strong affinities for trypsin, chymotrypsin, elastase, and cathepsin G. May prevent elastase-mediated damage to oral and possibly other mucosal tissues transcripts detectable by or according to Z25299seg20 amplicon (SEQ ID NO:1294) and primers: Z25299seg20F (SEQ ID NO:1294) and Z25299seg20R (SEQ ID NO:1294) was measured by real time PCR. In parallel the expression of four housekeeping genes—RPL19 (GenBank Accession No. NM_{—}000981 (SEQ ID NO:1580); RPL19 amplicon), TATA box (GenBank Accession No. NM_{—}003194 (SEQ ID NO:1581); TATA amplicon), Ubiquitin (GenBank Accession No. BC000449 (SEQ ID NO:1582); amplicon—Ubiquitin-amplicon) and SDHA (GenBank Accession No. NM_{—}004168 (SEQ ID NO:1583); amplicon—SDHA-amplicon) was measured similarly. For each RT sample, the expression of the above amplicon was normalized to the geometric mean of the quantities of the housekeeping genes. The normalized quantity of each RT sample was then divided by the median of the quantities of the ovary samples (Sample Nos. 18-20, Table 2, “Tissue samples on normal panel”), to obtain a value of relative expression of each sample relative to median of the ovary samples.

[1577] The results are demonstrated in FIG. 22, showing the expression of Secretory leukocyte protease inhibitor Acid-stable proteinase inhibitor with strong affinities for trypsin, chymotrypsin, elastase, and cathepsin G. May prevent elastase-mediated damage to oral and possibly other mucosal tissues Z25299 transcripts which are detectable by amplicon as depicted in sequence name Z25299seg20 (SEQ ID NO:1294) in different normal tissues.

Description for Cluster HUMF5A

[1578] Cluster HUMF5A features 3 transcript(s) and 33 segment(s) of interest, the names for which are given in Tables 1 and 2, respectively, the sequences themselves are given at the end of the application. The selected protein variants are given in table 3.

[1579] These sequences are variants of the known protein Coagulation factor V precursor (SwissProt accession identifier FA5_HUMAN; known also according to the synonyms Activated protein C cofactor), SEQ ID NO: 626, referred to herein as the previously known protein.

[1580] Protein Coagulation factor V precursor (SEQ ID NO:626) is known or believed to have the following function(s): Coagulation factor V is a cofactor that participates with factor Xa to activate prothrombin to thrombin. The sequence for protein Coagulation factor V precursor is given at the end of the application, as “Coagulation factor V precursor amino acid sequence”. Known polymorphisms for this sequence are as shown in Table 4.

[1581] The following GO Annotation(s) apply to the previously known protein. The following annotation(s) were found: cell adhesion; blood coagulation, which are annotation(s) related to Biological Process; and blood coagulation factor; copper binding, which are annotation(s) related to Molecular Function.

[1582] The GO assignment relies on information from one or more of the SwissProt/TremB1 Protein knowledgebase, available from <http://www.expasy.ch/sprot/>; or Locuslink, available from <http://www.ncbi.nlm.nih.gov/projects/LocusLink/>.

[1583] As noted above, cluster HUMF5A features 3 transcript(s), which were listed in Table 1 above. These transcript(s) encode for protein(s) which are variant(s) of protein Coagulation factor V precursor (SEQ ID NO:626). A description of each variant protein according to the present invention is now provided.

[1584] Variant protein HUMF5A_PEA_{—}1_P3 (SEQ ID NO:564) according to the present invention has an amino acid sequence as given at the end of the application; it is encoded by transcript(s) HUMF5A_PEA_{—}1_T1 (SEQ ID NO:33). An alignment is given to the known protein (Coagulation factor V precursor (SEQ ID NO:626)) at the end of the application. One or more alignments to one or more previously published protein sequences are given at the end of the application. A brief description of the relationship of the variant protein according to the present invention to each such aligned protein is as follows:

[1585] Comparison report between HUMF5A_PEA_{—}1_P3 (SEQ ID NO:564) and FA5_HUMAN_V1 (SEQ ID NO 627):

[1586] 1. An isolated chimeric polypeptide encoding for HUMF5A_PEA_{—}1_P3 (SEQ ID NO:564), comprising a first amino acid sequence being at least 90% homologous to MFPGCPRLWVLVVLGTSWVGWGSQGTEAAQLRQFYVAAQGISWSYRPEPTNSSLNLS VTSFKKIVYREYEPYFKKEKPQSTISGLLGPTLYAEVGDIIKVHFKNKADKPLSIHPQGIR YSKLSEGASYLDHTFPAEKMDDAVAPGREYTYEWSISEDSGPTHDDPPCLTHIYYSHEN LIEDFNSGLIGPLLICKKGTLTEGGTQKTFDKQIVLLFAVFDESKSWSQSSSLMYTVNGY VNGTMPDITVCAHDHISWHLLGMSSGPELFSIHFNGQVLEQNHHKVSAITLVSATSTTA NMTVGPEGKWIISSLTPKHLQAGMQAYIDIKNCPKKTRNLKKITREQRRHMKRWEYFI AAEEVIWDYAPVIPANMDKKYRSQHLDNFSNQIGKHYKKVMYTQYEDESFTKHTVNP NMKEDGILGPIIRAQVRDTLKIVFKNMASRPYSIYPHGVTFSPYEDEVNSSFTSGRNNTM IRAVQPGETYTYKWNILEFDEPTENDAQCLTRPYYSDVDIMRDIASGLIGLLLICKSRSL DRRGIQRAADIEQQAVFAVFDENKSWYLEDNINKFCENPDEVKRDDPKFYESNIMSTIN GYVPESITTLGFCFDDTVQWHFCSVGTQNEILTIHFTGHSFIYGKRHEDTLTLFPMRGES VTVTMDNVGTWMLTSMNSSPRSKKLRLKFRDVKClPDDDEDSYEIFEPPESTVMATRK MHDRLEPEDEESDADYDYQNRLAAALGIRSFRNSSLNQEEEEFNLTALALENGTEFVSS NTDIIVGSNYSSPSNISKFTVNNLAEPQKAPSHQQATTAGSPLRHLIGKNSVLNSSTAEHS SPYSEDPIEDPLQPDVTGIRLLSLGAGEFRSQEHAKRKGPKVERDQAAKHRFSWMKLLA HKVGRHLSQDTGSPSGMRPWEDLPSQDTGSPSRMRPWKDPPSDLLLLKQSNSSKILVG RWHLASEKGSYEIIQDTDEDTAVNNWLISPQNASRAWGESTPLANKPGKQSGHPKFPR VRHKSLQVRQDGGKSRLKKSQFLIKTRKKKKEKHTHHAPLSPRTFHPLRSEAYNTFSER RLKHSLVLHKSNETSLPTDLNQTLPSMDFGWIASLPDHNQNSSNDTGQASCPPGLYQTV PPEEHYQTFPIQDPDQMHSTSDPSHRSSSPELSEMLEYDRSHKSFPTDISQMSPSSEHEV WQTVISPDLSQVTLSPELSQTNLSPDLSHTTLSPELIQRNLSPALGQMPISPDLSHTTLSPD LSHTTLSLDLSQTNLSPELSQTNLSPALGQMPLSPDLSHTTLSLDFSQTNLSPELSHMTLS PELSQTNLSPALGQMPISPDLSHTTLSLDFSQTNLSPELSQTNLSPALGQMPLSPDPSHTT LSLDLSQTNLSPELSQTNLSPDLSEMPLFADLSQIPLTPDLDQMTLSPDLGETDLSPNFGQ MSLSPDLSQVTLSPDISDTTLLPDLSQISPPPDLDQIFYPSESSQSLLLQEFNESFPYPDLGQ MPSPSSPTLNDTFLSKEFNPLVIVGLSKDGTDYIEIIPKEEVQSSEDDYAEIDYVPYDDPY KTDVRTNINSSRDPDNIAAWYLRSNNGNRRNYYIAAEEISWDYSEFVQRETDIEDSDDIP EDTTYKK corresponding to amino acids 1-1617 of FA5_HUMAN_V1 (SEQ ID NO:627), which also corresponds to amino acids 1-1617 of HUMF5A_PEA_{—}1_P3 (SEQ ID NO:564), and a second amino acid sequence being at least 70%, optionally at least 80%, preferably at least 85%, more preferably at least 90% and most preferably at least 95% homologous to a polypeptide having the sequence GSMKSISEFLVLLSELKWMMLSKFVLKI (SEQ ID NO:1506) corresponding to amino acids 1618-1645 of HUMF5A_PEA_{—}1_P3 (SEQ ID NO:564), wherein said first amino acid sequence and second amino acid sequence are contiguous and in a sequential order.

[1587] 2. An isolated polypeptide encoding for a tail of HUMF5A_PEA_{—}1_P3 (SEQ ID NO:564), comprising a polypeptide being at least 70%, optionally at least about 80%, preferably at least about 85%, more preferably at least about 90% and most preferably at least about 95% homologous to the sequence GSMKSISEFLVLLSELKWMMLSKFVLKI (SEQ ID NO:1506) in HUMF5A_PEA_{—}1_P3 (SEQ ID NO:564).

[1588] It should be noted that the known protein sequence (FA5_HUMAN (SEQ ID NO:626) has one or more changes than the sequence given at the end of the application and named as being the amino acid sequence for FA5_HUMAN_V1 (SEQ ID NO:627). These changes were previously known to occur and are listed in the table below.

[1589] The location of the variant protein was determined according to results from a number of different software programs and analyses, including analyses from SignalP and other specialized programs. The variant protein is believed to be located as follows with regard to the cell: secreted. The protein localization is believed to be secreted because both signal-peptide prediction programs predict that this protein has a signal peptide, and neither trans-membrane region prediction program predicts that this protein has a trans-membrane region.

[1590] Variant protein HUMF5A_PEA_{—}1_P3 (SEQ ID NO:564) also has the following non-silent SNPs (Single Nucleotide Polymorphisms) as listed in Table 6, (given according to their position(s) on the amino acid sequence, with the alternative amino acid(s) listed; the last column indicates whether the SNP is known or not; the presence of known SNPs in variant protein HUMF5A_PEA_{—}1_P3 (SEQ ID NO:564) sequence provides support for the deduced sequence of this variant protein according to the present invention).

[1591] Variant protein HUMF5A_PEA_{—}1_P3 (SEQ ID NO:564) is encoded by the following transcript(s): HUMF5A_PEA_{—}1_T1 (SEQ ID NO:33), for which the sequence(s) is/are given at the end of the application. The coding portion of transcript HUMF5A_PEA_{—}1_T1 (SEQ ID NO:33) is shown in bold; this coding portion starts at position 183 and ends at position 5117. The transcript also has the following SNPs as listed in Table 7 (given according to their position on the nucleotide sequence, with the alternative nucleic acid listed; the last column indicates whether the SNP is known or not; the presence of known SNPs in variant protein HUMF5A_PEA_{—}1_P3 (SEQ ID NO:564) sequence provides support for the deduced sequence of this variant protein according to the present invention).

[1592] Variant protein HUMF5A_PEA_{—}1_P4 (SEQ ID NO:565) according to the present invention has an amino acid sequence as given at the end of the application; it is encoded by transcript(s) HUMF5A_PEA_{—}1_T3 (SEQ ID NO:34). An alignment is given to the known protein (Coagulation factor V precursor (SEQ ID NO:626)) at the end of the application. One or more alignments to one or more previously published protein sequences are given at the end of the application. A brief description of the relationship of the variant protein according to the present invention to each such aligned protein is as follows:

[1593] Comparison report between HUMF5A_PEA_{—}1_P4 (SEQ ID NO:565) and FA5_HUMAN_V1(SEQ ID NO:627):

[1594] 1. An isolated chimeric polypeptide encoding for HUMF5A_PEA_{—}1_P4 (SEQ ID NO:565), comprising a first amino acid sequence being at least 90% homologous to MFPGCPRLWVLVVLGTSWVGWGSQGTEAAQLRQFYVAAQGISWSYRPEPTNSSLNLS VTSFKKIVYREYEPYFKKEKPQSTISGLLGPTLYAEVGDIIKVHFKNKADKPLSIHPQGIR YSKLSEGASYLDHTFPAEKMDDAVAPGREYTYEWSISEDSGPTHDDPPCLTHIYYSHEN LIEDFNSGLIGPLLICKKGTLTEGGTQKTFDKQIVLLFAVFDESKSWSQSSSLMYTVNGY VNGTMPDITVCAHDHISWHLLGMSSGPELFSIHFNGQVLEQNHHKVSAITLVSATSTTA NMTVGPEGKWIISSLTPKHLQAGMQAYIDIKNCPKKTRNLKKITREQRRHMKRWEYFI AAEEVIWDYAPVIPANMDKKYRSQHLDNFSNQIGKHYKKVMYTQYEDESFTKHTVNP NMKEDGILGPIIRAQVRDTLKIVFKNMASRPYSIYPHGVTFSPYEDEVNSSFTSGRNNTM IRAVQPGETYTYKWNILEFDEPTENDAQCLTRPYYSDVDIMRDIASGLIGLLLICKSRSL DRRGIQRAADIEQQAVFAVFDENKSWYLEDNINKFCENPDEVKRDDPKFYESNIMSTIN GYVPESITTLGFCFDDTVQWHFCSVGTQNEILTIHFTGHSFIYGKRHEDTLTLFPMRGES VTVTMDNVGTWMLTSMNSSPRSKKLRLKFRDVKClPDDDEDSYEIFEPPESTVMATRK MHDRLEPEDEESDADYDYQNRLAAALGIRSFRNSSLNQEEEEFNLTALALENGTEFVSS NTDIIVGSNYSSPSNISKFTVNNLAEPQKAPSHQQATTAGSPLRHLIGKNSVLNSSTAEHS SPYSEDPIEDPLQPDVTGIRLLSLGAGEFRSQEHAKRKGPKVERDQAAKHRFSWMKLLA HKVGRHLSQDTGSPSGMRPWEDLPSQDTGSPSRMRPWKDPPSDLLLLKQSNSSKILVG RWHLASEKGSYEIIQDTDEDTAVNNWLISPQNASRAWGESTPLANKPGKQSGHPKFPR VRHKSLQVRQDGGKSRLKKSQFLIKTRKKKKEKHTHHAPLSPRTFHPLRSEAYNTFSER RLKHSLVLHKSNETSLPTDLNQTLPSMDFGWIASLPDHNQNSSNDTGQASCPPGLYQTV PPEEHYQTFPIQDPDQMHSTSDPSHRSSSPELSEMLEYDRSHKSFPTDISQMSPSSEHEV WQTVISPDLSQVTLSPELSQTNLSPDLSHTTLSPELIQRNLSPALGQMPISPDLSHTTLSPD LSHTTLSLDLSQTNLSPELSQTNLSPALGQMPLSPDLSHTTLSLDFSQTNLSPELSHMTLS PELSQTNLSPALGQMPISPDLSHTTLSLDFSQTNLSPELSQTNLSPALGQMPLSPDPSHTT LSLDLSQTNLSPELSQTNLSPDLSEMPLFADLSQIPLTPDLDQMTLSPDLGETDLSPNFGQ MSLSPDLSQVTLSPDISDTTLLPDLSQISPPPDLDQIFYPSESSQSLLLQEFNESFPYPDLGQ MPSPSSPTLNDTFLSKEFNPLVIVGLSKDGTDYIEIIPKEEVQSSEDDYAEIDYVPYDDPY KTDVRTNINSSRDPDNIAAWYLRSNNGNRRNYYIAAEEISWDYSEFVQRETDIEDSDDIP EDTTYKKVVFRKYLDSTFTKRDPRGEYEEHLGILGPIIRAEVDDVIQVRFKNLASRPYSL HAHGLSYEKSSEGKTYEDDSPEWFKEDNAVQPNSSYTYVWHATERSGPESPGSACRA WAYYSAVNPEKDIHSGLIGPLLICQKGILHKDSNMPVDMREFVLLFMTFDEKKSWYYE KKSRSSWRLTSSEMKKSHEFHAINGMIYSLPGLKMYEQEWVRLHLLNIGGSQDIHVVH FHGQTLLENGNKQHQLGVWPLLPGSFKTLEMKASKPGWWLLNTEVGENQRAGMQTP FLIMDRDCRMPMGLSTGIISDSQIKASEFLGYWEPRLARLNNGGSYNAWSVEKLAAEFA SKPWIQVDMQKEVIITGIQTQGAKHYLKSCYTTEFYVAYSSNQINWQIFKGNSTRNVMY FNGNSDASTIKENQFDPPIVARYIRISPTRAYNRPTLRLELQGCE corresponding to amino acids 1-2062 of FA5_HUMAN_V1(SEQ ID NO:627), which also corresponds to amino acids 1-2062 of HUMF5A_PEA_{—}1_P4 (SEQ ID NO:565), and a second amino acid sequence being at least 70%, optionally at least 80%, preferably at least 85%, more preferably at least 90% and most preferably at least 95% homologous to a polypeptide having the sequence DVPHPWVWKMER (SEQ ID NO:1507) corresponding to amino acids 2063-2074 of HUMF5A_PEA_{—}1_P4 (SEQ ID NO:565), wherein said first amino acid sequence and second amino acid sequence are contiguous and in a sequential order.

[1595] 2. An isolated polypeptide encoding for a tail of HUMF5A_PEA_{—}1_P4 (SEQ ID NO:565) comprising a polypeptide being at least 70%, optionally at least about 80%, preferably at least about 85%, more preferably at least about 90% and most preferably at least about 95% homologous to the sequence DVPHPWVWKMER (SEQ ID NO:1507) in HUMF5A_PEA_{—}1_P4 (SEQ ID NO:565).

[1596] It should be noted that the known protein sequence (FA5_HUMAN (SEQ ID NO:626) has one or more changes than the sequence given at the end of the application and named as being the amino acid sequence for FA5_HUMAN_V1 (SEQ ID NO:627). These changes were previously known to occur and are listed in the table below.

[1597] The location of the variant protein was determined according to results from a number of different software programs and analyses, including analyses from SignalP and other specialized programs. The variant protein is believed to be located as follows with regard to the cell: secreted. The protein localization is believed to be secreted because both signal-peptide prediction programs predict that this protein has a signal peptide, and neither trans-membrane region prediction program predicts that this protein has a trans-membrane region.

[1598] Variant protein HUMF5A_PEA_{—}1_P4 (SEQ ID NO:565) also has the following non-silent SNPs (Single Nucleotide Polymorphisms) as listed in Table 9, (given according to their position(s) on the amino acid sequence, with the alternative amino acid(s) listed; the last column indicates whether the SNP is known or not; the presence of known SNPs in variant protein HUMF5A_PEA_{—}1_P4 (SEQ ID NO:565) sequence provides support for the deduced sequence of this variant protein according to the present invention).

[1599] Variant protein HUMF5A_PEA_{—}1_P4 (SEQ ID NO:565) is encoded by the following transcript(s): HUMF5A_PEA_{—}1_T3 (SEQ ID NO:34, for which the sequence(s) is/are given at the end of the application. The coding portion of transcript HUMF5A_PEA_{—}1_T3 (SEQ ID NO:34) is shown in bold; this coding portion starts at position 183 and ends at position 6404. The transcript also has the following SNPs as listed in Table 10 (given according to their position on the nucleotide sequence, with the alternative nucleic acid listed; the last column indicates whether the SNP is known or not; the presence of known SNPs in variant protein HUMF5A_PEA_{—}1_P4 (SEQ ID NO:565) sequence provides support for the deduced sequence of this variant protein according to the present invention).

[1600] Variant protein HUMF5A_PEA_{—}1_P8 (SEQ ID NO:566) according to the present invention has an amino acid sequence as given at the end of the application; it is encoded by transcript(s) HUMF5A_PEA_{—}1_T7 (SEQ ID NO:35). An alignment is given to the known protein (Coagulation factor V precursor (SEQ ID NO:626)) at the end of the application. One or more alignments to one or more previously published protein sequences are given at the end of the application. A brief description of the relationship of the variant protein according to the present invention to each such aligned protein is as follows:

[1601] Comparison report between HUMF5A_PEA_{—}1_P8 (SEQ ID NO:566) and FA5_HUMAN (SEQ ID NO:626):

[1602] 1. An isolated chimeric polypeptide encoding for HUMF5A_PEA_{—}1_P8 (SEQ ID NO:566), comprising a first amino acid sequence being at least 90% homologous to MFPGCPRLWVLVVLGTSWVGWGSQGTEAAQLRQFYVAAQGISWSYRPEPTNSSLNLS VTSFKKIVYREYEPYFKKEKPQSTISGLLGPTLYAEVGDIIKVHFKNKADKPLSIHPQGIR YSKLSEGASYLDHTFPAEKMDDAVAPGREYTYEWSISEDSGPTHDDPPCLTHIYYSHEN LIEDFNSGLIGPLLICKKGTLTEGGTQKTFDKQIVLLFAVFDESKSWSQSSSLMYTVNGY VNGTMPDITVCAHDHISWHLLGMSSGPELFSIHFNGQVLEQNHHKVSAITLVSATSTTA NMTVGPEGKWIISSLTPKHLQAGMQAYIDIKNCPKKTRNLKKITREQRRHMKRWEYFI AAEEVIWDYAPVIPANMDKKYRSQHLDNFSNQIGKHYKKVMYTQYEDESFTKHTVNP NMKEDGILGPIIRAQVRDTLKIVFKNMASRPYSIYPHGVTFSPYEDEVNSSFTSGRNNTM IRAVQPGETYTYKWNILEFDEPTENDAQCLTRPYYSDVDIMRDIASGLIGLLLICKSRSL DRRGIQRAADIEQQAVFAVFDENKSWYLEDNINKFCENPDEVKRDDPKFYESNIMS corresponding to amino acids 1-587 of FA5_HUMAN (SEQ ID NO:626), which also corresponds to amino acids 1-587 of HUMF5A_PEA_{—}1_P8 (SEQ ID NO:566), and a second amino acid sequence being at least 70%, optionally at least 80%, preferably at least 85%, more preferably at least 90% and most preferably at least 95% homologous to a polypeptide having the sequence SKSEYYFCSSVFHSCG (SEQ ID NO:1508) corresponding to amino acids 588-603 of HUMF5A_PEA_{—}1_P8 (SEQ ID NO:566), wherein said first amino acid sequence and second amino acid sequence are contiguous and in a sequential order.

[1603] 2. An isolated polypeptide encoding for a tail of HUMF5A_PEA_{—}1_P8 (SEQ ID NO:566) comprising a polypeptide being at least 70%, optionally at least about 80%, preferably at least about 85%, more preferably at least about 90% and most preferably at least about 95% homologous to the sequence SKSEYYFCSSVFHSCG (SEQ ID NO:1508) in HUMF5A_PEA_{—}1_P8 (SEQ ID NO:566).

[1604] The location of the variant protein was determined according to results from a number of different software programs and analyses, including analyses from SignalP and other specialized programs. The variant protein is believed to be located as follows with regard to the cell: secreted. The protein localization is believed to be secreted because both signal-peptide prediction programs predict that this protein has a signal peptide, and neither trans-membrane region prediction program predicts that this protein has a trans-membrane region.

[1605] Variant protein HUMF5A_PEA_{—}1_P8 (SEQ ID NO:566) also has the following non-silent SNPs (Single Nucleotide Polymorphisms) as listed in Table 11, (given according to their position(s) on the amino acid sequence, with the alternative amino acid(s) listed; the last column indicates whether the SNP is known or not; the presence of known SNPs in variant protein HUMF5A_PEA_{—}1_P8 (SEQ ID NO:566) sequence provides support for the deduced sequence of this variant protein according to the present invention).

[1606] The glycosylation sites of variant protein HUMF5A_PEA_{—}1_P8 (SEQ ID NO:566), as compared to the known protein Coagulation factor V precursor (SEQ ID NO:626), are described in Table 12 (given according to their position(s) on the amino acid sequence in the first column; the second column indicates whether the glycosylation site is present in the variant protein; and the last column indicates whether the position is different on the variant protein).

[1607] The phosphorylation sites of variant protein HUMF5A_PEA_{—}1_P8 (SEQ ID NO:566), as compared to the known protein Coagulation factor V precursor (SEQ ID NO:626), are described in Table 13 (given according to their position(s) on the amino acid sequence in the first column; the second column indicates whether the phosphorylation site is present in the variant protein; and the last column indicates whether the position is different on the variant protein).

[1608] Variant protein HUMF5A_PEA_{—}1_P8 (SEQ ID NO:566) is encoded by the following transcript(s): HUMF5A_PEA_{—}1_T7 (SEQ ID NO:35), for which the sequence(s) is/are given at the end of the application. The coding portion of transcript HUMF5A_PEA_{—}1_T7 (SEQ ID NO:35) is shown in bold; this coding portion starts at position 183 and ends at position 1991. The transcript also has the following SNPs as listed in Table 14 (given according to their position on the nucleotide sequence, with the alternative nucleic acid listed; the last column indicates whether the SNP is known or not; the presence of known SNPs in variant protein HUMF5A_PEA_{—}1_P8 (SEQ ID NO:566) sequence provides support for the deduced sequence of this variant protein according to the present invention).

[1609] As noted above, cluster HUMF5A features 33 segment(s), which were listed in Table 2 above and for which the sequence(s) are given at the end of the application. These segment(s) are portions of nucleic acid sequence(s) which are described herein separately because they are of particular interest. A description of each segment according to the present invention is now provided.

[1610] Segment cluster HUMF5A_PEA_{—}1_node_{—}0 (SEQ ID NO:252) according to the present invention is supported by 9 libraries. The number of libraries was determined as previously described. This segment can be found in the following transcript(s): HUMF5A_PEA_{—}1_T1 (SEQ ID NO:33, HUMF5A_PEA_{—}1_T3 (SEQ ID NO:34) and HUMF5A_PEA_{—}1_T7 (SEQ ID NO:35). Table 15 below describes the starting and ending position of this segment on each transcript.

[1611] Segment cluster HUMF5A_PEA_{—}1_node_{—}4 (SEQ ID NO:253) according to the present invention is supported by 7 libraries. The number of libraries was determined as previously described. This segment can be found in the following transcript(s): HUMF5A_PEA_{—}1_T1 (SEQ ID NO:33), HUMF5A_PEA_{—}1_T3 (SEQ ID NO:34) and HUMF5A_PEA_{—}1_T7 (SEQ ID NO:35). Table 16 below describes the starting and ending position of this segment on each transcript.

[1612] Segment cluster HUMF5A_PEA_{—}1_node_{—}6 (SEQ ID NO:254) according to the present invention is supported by 11 libraries. The number of libraries was determined as previously described. This segment can be found in the following transcript(s): HUMF5A_PEA_{—}1_T1 (SEQ ID NO:33), HUMF5A_PEA_{—}1_T3 (SEQ ID NO:34) and HUMF5A_PEA_{—}1_T7 (SEQ ID NO:35). Table 17 below describes the starting and ending position of this segment on each transcript.

[1613] Segment cluster HUMF5A_PEA_{—}1_node_{—}8 (SEQ ID NO:255) according to the present invention is supported by 8 libraries. The number of libraries was determined as previously described. This segment can be found in the following transcript(s): HUMF5A_PEA_{—}1_T1 (SEQ ID NO:33), HUMF5A_PEA_{—}1_T3 (SEQ ID NO:34) and HUMF5A_PEA_{—}1_T7 (SEQ ID NO:35). Table 18 below describes the starting and ending position of this segment on each transcript.

[1614] Segment cluster HUMF5A_PEA_{—}1_node_{—}10 (SEQ ID NO:256) according to the present invention is supported by 7 libraries. The number of libraries was determined as previously described. This segment can be found in the following transcript(s): HUMF5A_PEA_{—}1_T1 (SEQ ID NO:33), HUMF5A_PEA_{—}1_T3 (SEQ ID NO:34) and HUMF5A_PEA_{—}1_T7 (SEQ ID NO:35). Table 19 below describes the starting and ending position of this segment on each transcript.

[1615] Segment cluster HUMF5A_PEA_{—}1_node_{—}12 (SEQ ID NO:257) according to the present invention is supported by 10 libraries. The number of libraries was determined as previously described. This segment can be found in the following transcript(s): HUMF5A_PEA_{—}1_T1 (SEQ ID NO:33), HUMF5A_PEA_{—}1_T3 (SEQ ID NO:34) and HUMF5A_PEA_{—}1_T7 (SEQ ID NO:35). Table 20 below describes the starting and ending position of this segment on each transcript.

[1616] Segment cluster HUMF5A_PEA_{—}1_node_{—}14 (SEQ ID NO:258) according to the present invention is supported by 9 libraries. The number of libraries was determined as previously described. This segment can be found in the following transcript(s): HUMF5A_PEA_{—}1_T1 (SEQ ID NO:33, HUMF5A_PEA_{—}1_T3 (SEQ ID NO:34) and HUMF5A_PEA_{—}1_T7 (SEQ ID NO:35). Table 21 below describes the starting and ending position of this segment on each transcript.

[1617] Segment cluster HUMF5A_PEA_{—}1_node_{—}18 (SEQ ID NO:259) according to the present invention is supported by 10 libraries. The number of libraries was determined as previously described. This segment can be found in the following transcript(s): HUMF5A_PEA_{—}1_T1 (SEQ ID NO:33), HUMF5A_PEA_{—}1_T3 (SEQ ID NO:34) and HUMF5A_PEA_{—}1_T7 (SEQ ID NO:35). Table 22 below describes the starting and ending position of this segment on each transcript.

[1618] Segment cluster HUMF5A_PEA_{—}1_node_{—}21 (SEQ ID NO:260) according to the present invention is supported by 12 libraries. The number of libraries was determined as previously described. This segment can be found in the following transcript(s): HUMF5A_PEA_{—}1_T1 (SEQ ID NO:33), HUMF5A_PEA_{—}1_T3 (SEQ ID NO:34) and HUMF5A_PEA_{—}1_T7 (SEQ ID NO:35). Table 23 below describes the starting and ending position of this segment on each transcript.

[1619] Segment cluster HUMF5A_PEA_{—}1_node_{—}22 (SEQ ID NO:261) according to the present invention is supported by 1 libraries. The number of libraries was determined as previously described. This segment can be found in the following transcript(s): HUMF5A_PEA_{—}1_T7 (SEQ ID NO:35). Table 24 below describes the starting and ending position of this segment on each transcript.

[1620] Segment cluster HUMF5A_PEA_{—}1_node_{—}24 (SEQ ID NO:262) according to the present invention is supported by 13 libraries. The number of libraries was determined as previously described. This segment can be found in the following transcript(s): HUMF5A_PEA_{—}1_T1 (SEQ ID NO:33) and HUMF5A_PEA_{—}1_T3 (SEQ ID NO:34). Table 25 below describes the starting and ending position of this segment on each transcript.

[1621] Segment cluster HUMF5A_PEA_{—}1_node_{—}26 (SEQ ID NO:263) according to the present invention is supported by 33 libraries. The number of libraries was determined as previously described. This segment can be found in the following transcript(s): HUMF5A_PEA_{—}1_T1 (SEQ ID NO:33) and HUMF5A_PEA_{—}1_T3 (SEQ ID NO:34). Table 26 below describes the starting and ending position of this segment on each transcript.

[1622] Segment cluster HUMF5A_PEA_{—}1_node_{—}27 (SEQ ID NO:264) according to the present invention is supported by 12 libraries. The number of libraries was determined as previously described. This segment can be found in the following transcript(s): HUMF5A_PEA_{—}1_T1 (SEQ ID NO:33) and HUMF5A_PEA_{—}1_T3 (SEQ ID NO:34). Table 27 below describes the starting and ending position of this segment on each transcript.

[1623] Segment cluster HUMF5A_PEA_{—}1_node_{—}29 (SEQ ID NO:265) according to the present invention is supported by 22 libraries. The number of libraries was determined as previously described. This segment can be found in the following transcript(s): HUMF5A_PEA_{—}1_T1 (SEQ ID NO:33) and HUMF5A_PEA_{—}1_T3 (SEQ ID NO:34). Table 28 below describes the starting and ending position of this segment on each transcript.

[1624] Segment cluster HUMF5A_PEA_{—}1_node_{—}35 (SEQ ID NO:266) according to the present invention is supported by 7 libraries. The number of libraries was determined as previously described. This segment can be found in the following transcript(s): HUMF5A_PEA_{—}1_T1 (SEQ ID NO:33) and HUMF5A_PEA_{—}1_T3 (SEQ ID NO:34). Table 29 below describes the starting and ending position of this segment on each transcript.

[1625] Segment cluster HUMF5A_PEA_{—}1_node_{—}37 (SEQ ID NO:267) according to the present invention is supported by 9 libraries. The number of libraries was determined as previously described. This segment can be found in the following transcript(s): HUMF5A_PEA_{—}1_T1 (SEQ ID NO:33) and HUMF5A_PEA_{—}1_T3 (SEQ ID NO:34). Table 30 below describes the starting and ending position of this segment on each transcript.

[1626] Segment cluster HUMF5A_PEA_{—}1_node_{—}39 (SEQ ID NO:268) according to the present invention is supported by 10 libraries. The number of libraries was determined as previously described. This segment can be found in the following transcript(s): HUMF5A_PEA_{—}1_T1 (SEQ ID NO:33) and HUMF5A_PEA_{—}1_T3 (SEQ ID NO:34). Table 31 below describes the starting and ending position of this segment on each transcript.

[1627] Segment cluster HUMF5A_PEA_{—}1_node_{—}47 (SEQ ID NO:269) according to the present invention is supported by 14 libraries. The number of libraries was determined as previously described. This segment can be found in the following transcript(s): HUMF5A_PEA_{—}1_T1 (SEQ ID NO:33) and HUMF5A_PEA_{—}1_T3 (SEQ ID NO:34). Table 32 below describes the starting and ending position of this segment on each transcript.

[1628] Segment cluster HUMF5A_PEA_{—}1_node_{—}50 (SEQ ID NO:270) according to the present invention is supported by 20 libraries. The number of libraries was determined as previously described. This segment can be found in the following transcript(s): HUMF5A_PEA_{—}1_T1 (SEQ ID NO:33) and HUMF5A_PEA_{—}1_T3 (SEQ ID NO:34). Table 33 below describes the starting and ending position of this segment on each transcript.

[1629] Segment cluster HUMF5A_PEA_{—}1_node_{—}53 (SEQ ID NO:271) according to the present invention is supported by 29 libraries. The number of libraries was determined as previously described. This segment can be found in the following transcript(s): HUMF5A_PEA_{—}1_T1 (SEQ ID NO:33) and HUMF5A_PEA_{—}1_T3 (SEQ ID NO:34). Table 34 below describes the starting and ending position of this segment on each transcript.

[1630] Segment cluster HUMF5A_PEA_{—}1_node_{—}56 (SEQ ID NO:272) according to the present invention is supported by 24 libraries. The number of libraries was determined as previously described. This segment can be found in the following transcript(s): HUMF5A_PEA_{—}1_T1 (SEQ ID NO:33) and HUMF5A_PEA_{—}1_T3 (SEQ ID NO:34). Table 35 below describes the starting and ending position of this segment on each transcript.

[1631] Segment cluster HUMF5A_PEA_{—}1_node_{—}60 (SEQ ID NO:273) according to the present invention is supported by 24 libraries. The number of libraries was determined as previously described. This segment can be found in the following transcript(s): HUMF5A_PEA_{—}1_T1 (SEQ ID NO:33) and HUMF5A_PEA_{—}1_T3 (SEQ ID NO:34). Table 36 below describes the starting and ending position of this segment on each transcript.

[1632] According to an optional embodiment of the present invention, short segments related to the above cluster are also provided. These segments are up to about 120 bp in length, and so are included in a separate description.

[1633] Segment cluster HUMF5A_PEA_{—}1_node_{—}2 (SEQ ID NO:274) according to the present invention is supported by 6 libraries. The number of libraries was determined as previously described. This segment can be found in the following transcript(s): HUMF5A_PEA_{—}1_T1 (SEQ ID NO:33), HUMF5A_PEA_{—}1_T3 (SEQ ID NO:34) and HUMF5A_PEA_{—}1_T7 (SEQ ID NO:35). Table 37 below describes the starting and ending position of this segment on each transcript.

[1634] Segment cluster HUMF5A_PEA_{—}1_node_{—}16 (SEQ ID NO:275) according to the present invention is supported by 10 libraries. The number of libraries was determined as previously described. This segment can be found in the following transcript(s): HUMF5A_PEA_{—}1_T1 (SEQ ID NO:33, HUMF5A_PEA_{—}1_T3 (SEQ ID NO:34) and HUMF5A_PEA_{—}1_T7 (SEQ ID NO:35). Table 38 below describes the starting and ending position of this segment on each transcript.

[1635] Segment cluster HUMF5A_PEA_{—}1_node_{—}31 (SEQ ID NO:276) according to the present invention is supported by 3 libraries. The number of libraries was determined as previously described. This segment can be found in the following transcript(s): HUMF5A_PEA_{—}1_T1 (SEQ ID NO:33) and HUMF5A_PEA_{—}1_T3 (SEQ ID NO:34). Table 39 below describes the starting and ending position of this segment on each transcript.

[1636] Segment cluster HUMF5A_PEA_{—}1_node_{—}32 (SEQ ID NO:277) according to the present invention is supported by 2 libraries. The number of libraries was determined as previously described. This segment can be found in the following transcript(s): HUMF5A_PEA_{—}1_T3 (SEQ ID NO:34). Table 40 below describes the starting and ending position of this segment on each transcript.

[1637] Segment cluster HUMF5A_PEA_{—}1_node_{—}33 (SEQ ID NO:278) according to the present invention is supported by 4 libraries. The number of libraries was determined as previously described. This segment can be found in the following transcript(s): HUMF5A_PEA_{—}1_T1 (SEQ ID NO:33) and HUMF5A_PEA_{—}1_T3 (SEQ ID NO:34). Table 41 below describes the starting and ending position of this segment on each transcript.

[1638] Segment cluster HUMF5A_PEA_{—}1_node_{—}41 (SEQ ID NO:279) according to the present invention is supported by 8 libraries. The number of libraries was determined as previously described. This segment can be found in the following transcript(s): HUMF5A_PEA_{—}1_T1 (SEQ ID NO:33) and HUMF5A_PEA_{—}1_T3 (SEQ ID NO:34). Table 42 below describes the starting and ending position of this segment on each transcript.

[1639] Segment cluster HUMF5A_PEA_{—}1_node_{—}43 (SEQ ID NO:280) according to the present invention is supported by 6 libraries. The number of libraries was determined as previously described. This segment can be found in the following transcript(s): HUMF5A_PEA_{—}1_T1 (SEQ ID NO:33) and HUMF5A_PEA_{—}1_T3 (SEQ ID NO:34). Table 43 below describes the starting and ending position of this segment on each transcript.

[1640] Segment cluster HUMF5A_PEA_{—}1_node_{—}45 (SEQ ID NO:281) according to the present invention is supported by 12 libraries. The number of libraries was determined as previously described. This segment can be found in the following transcript(s): HUMF5A_PEA_{—}1_T1 (SEQ ID NO:33) and HUMF5A_PEA_{—}1_T3 (SEQ ID NO:34). Table 44 below describes the starting and ending position of this segment on each transcript.

[1641] Segment cluster HUMF5A_PEA_{—}1_node_{—}51 (SEQ ID NO:282) according to the present invention can be found in the following transcript(s): HUMF5A_PEA_{—}1_T1 (SEQ ID NO:33. Table 45 below describes the starting and ending position of this segment on each transcript.

[1642] Segment cluster HUMANK_node_{—}120 (SEQ ID NO:294) according to the present invention is supported by 13 libraries. The number of libraries was determined as previously described. This segment can be found in the following transcript(s): HUMANK_T3 (SEQ ID NO:36), HUMANK_T13 (SEQ ID NO:37), HUMANK_T23 (SEQ ID NO:38), HUMANK_T24 (SEQ ID NO:39), HUMANK_T26 (SEQ ID NO:40), HUMANK_T27 (SEQ ID NO:41) and HUMANK_T28 (SEQ ID NO:42). Table 33 below describes the starting and ending position of this segment on each transcript.

[1643] According to an optional embodiment of the present invention, short segments related to the above cluster are also provided. These segments are up to about 120 bp in length, and so are included in a separate description.

[1644] Segment cluster HUMANK_node_{—}94 (SEQ ID NO:295) according to the present invention is supported by 28 libraries. The number of libraries was determined as previously described. This segment can be found in the following transcript(s): HUMANK_T3 (SEQ ID NO:36), HUMANK_T13 (SEQ ID NO:37), HUMANK_T23 (SEQ ID NO:38) HUMANK_T24 (SEQ ID NO:39), HUMANK_T26 (SEQ ID NO:40), HUMANK_T27 (SEQ ID NO:41), HUMANK_T28 (SEQ ID NO:42) and HUMANK_T35 (SEQ ID NO:43). Table 34 below describes the starting and ending position of this segment on each transcript.

[1645] Segment cluster HUMANK_node_{—}95 (SEQ ID NO:296) according to the present invention is supported by 28 libraries. The number of libraries was determined as previously described. This segment can be found in the following transcript(s): HUMANK_T3 (SEQ ID NO:36), HUMANK_T13 (SEQ ID NO:37), HUMANK_T23 (SEQ ID NO:38), HUMANK_T24 (SEQ ID NO:39, HUMANK_T26 (SEQ ID NO:40, HUMANK_T27 (SEQ ID NO:41, HUMANK_T28 (SEQ ID NO:42) and HUMANK_T35 (SEQ ID NO:43). Table 35 below describes the starting and ending position of this segment on each transcript.

[1646] Segment cluster HUMANK_node_{—}98 (SEQ ID NO:297) according to the present invention is supported by 53 libraries. The number of libraries was determined as previously described. This segment can be found in the following transcript(s): HUMANK_T3 (SEQ ID NO:36), HUMANK_T13 (SEQ ID NO:37), HUMANK_T23 (SEQ ID NO:38) HUMANK_T24 (SEQ ID NO:39), HUMANK_T26 (SEQ ID NO:40), HUMANK_T27 (SEQ ID NO:41), HUMANK_T28 (SEQ ID NO:42) and HUMANK_T35 (SEQ ID NO:43). Table 36 below describes the starting and ending position of this segment on each transcript.

[1647] Segment cluster HUMANK_node_{—}99 (SEQ ID NO:298) according to the present invention can be found in the following transcript(s): HUMANK_T3 (SEQ ID NO:36), HUMANK_T13 (SEQ ID NO:37), HUMANK_T23 (SEQ ID NO:38), HUMANK_T24 (SEQ ID NO:39), HUMANK_T26 (SEQ ID NO:40), HUMANK_T27 (SEQ ID NO:41), HUMANK_T28 (SEQ ID NO:42) and HUMANK_T35 (SEQ ID NO:43). Table 37 below describes the starting and ending position of this segment on each transcript.

[1648] Segment cluster HUMANK_node_{—}102 (SEQ ID NO:299) according to the present invention is supported by 57 libraries. The number of libraries was determined as previously described. This segment can be found in the following transcript(s): HUMANK_T3 (SEQ ID NO:36), HUMANK_T13 (SEQ ID NO:37), HUMANK_T26 (SEQ ID NO:40), HUMANK_T27 (SEQ ID NO:41) and HUMANK_T28 (SEQ ID NO:42). Table 38 below describes the starting and ending position of this segment on each transcript.

[1649] Segment cluster HUMANK_node_{—}103 (SEQ ID NO:300) according to the present invention can be found in the following transcript(s): HUMANK_T3 (SEQ ID NO:36) HUMANK_T13 (SEQ ID NO:37, HUMANK_T26 (SEQ ID NO:40, HUMANK_T27 (SEQ ID NO:41) and HUMANK_T28 (SEQ ID NO:42. Table 39 below describes the starting and ending position of this segment on each transcript.

[1650] Segment cluster HUMANK_node_{—}104 (SEQ ID NO:301) according to the present invention can be found in the following transcript(s): HUMANK_T3 (SEQ ID NO:36), HUMANK_T13 (SEQ ID NO:37, HUMANK_T26 (SEQ ID NO:40, HUMANK_T27 (SEQ ID NO:41) and HUMANK_T28 (SEQ ID NO:42). Table 40 below describes the starting and ending position of this segment on each transcript.

[1651] Segment cluster HUMANK_node_{—}105 (SEQ ID NO:302) according to the present invention is supported by 33 libraries. The number of libraries was determined as previously described. This segment can be found in the following transcript(s): HUMANK_T13 (SEQ ID NO:37), HUMANK_T26 (SEQ ID NO:40), HUMANK_T27 (SEQ ID NO:41) and HUMANK_T28 (SEQ ID NO:42). Table 41 below describes the starting and ending position of this segment on each transcript.

[1652] Segment cluster HUMANK_node_{—}106 (SEQ ID NO:303) according to the present invention is supported by 31 libraries. The number of libraries was determined as previously described. This segment can be found in the following transcript(s): HUMANK_T13 (SEQ ID NO:37) and HUMANK_T27 (SEQ ID NO:41). Table 42 below describes the starting and ending position of this segment on each transcript.

[1653] Segment cluster HUMANK_node_{—}112 (SEQ ID NO:304) according to the present invention is supported by 56 libraries. The number of libraries was determined as previously described. This segment can be found in the following transcript(s): HUMANK_T3 (SEQ ID NO:36), HUMANK_T13 (SEQ ID NO:37), HUMANK_T23 (SEQ ID NO:38) HUMANK_T24 (SEQ ID NO:39, HUMANK_T26 (SEQ ID NO:40), HUMANK_T27 (SEQ ID NO:41) and HUMANK_T28 (SEQ ID NO:42). Table 43 below describes the starting and ending position of this segment on each transcript.

[1654] Segment cluster HUMANK_node_{—}114 (SEQ ID NO:305) according to the present invention is supported by 55 libraries. The number of libraries was determined as previously described. This segment can be found in the following transcript(s): HUMANK_T3 (SEQ ID NO:36), HUMANK_T13 (SEQ ID NO:37), HUMANK_T23 (SEQ ID NO:38), HUMANK_T24 (SEQ ID NO:39), HUMANK_T26 (SEQ ID NO:40, HUMANK_T27 (SEQ ID NO:41) and HUMANK_T28 (SEQ ID NO:42). Table 44 below describes the starting and ending position of this segment on each transcript.

[1655] Segment cluster HUMANK_node_{—}116 (SEQ ID NO:306) according to the present invention can be found in the following transcript(s): HUMANK_T3 (SEQ ID NO:36). Table 45 below describes the starting and ending position of this segment on each transcript.

Variant protein alignment to the previously known protein:

Sequence name: AAH07930 (SEQ ID NO:631)

Sequence Documentation:

Alignment of: HUMANK_P12 (SEQ ID NO:567)×AAH07930 (SEQ ID NO:631) ••

Alignment segment 1/1:

Alignment:

Sequence name: ANK1_HUMAN_V1 (SEQ ID NO:629)

Sequence Documentation:

Alignment of: HUMANK_P12 (SEQ ID NO:567)×ANK1_HUMAN_V1 (SEQ ID NO:629) ••

Alignment segment 1/1:

Alignment:

Sequence name: Q8N604 (SEQ ID NO:630)

Sequence Documentation:

Alignment of: HUMANK_P12 (SEQ ID NO:567)×Q8N604 (SEQ ID NO:630) ••

Alignment segment 1/1:

Alignment:

Sequence name: AAH07930 (SEQ ID NO:631)

Sequence Documentation:

Alignment of: HUMANK_P21 (SEQ ID NO:568)×AAH07930 (SEQ ID NO:631) ••

Alignment segment 1/1:

Alignment:

Sequence name: Q8N604 (SEQ ID NO:630)

Sequence Documentation:

Alignment of: HUMANK_P21 (SEQ ID NO:568)×Q8N604 (SEQ ID NO:630) ••

Alignment segment 1/1:

Alignment:

Sequence name: AAH07930 (SEQ ID NO:631)

Sequence Documentation:

Alignment of: HUMANK_P22 (SEQ ID NO:569)×AAH07930 (SEQ ID NO:631) ••

Alignment segment 1/1:

Alignment:

Sequence name: Q8N604 (SEQ ID NO:630)

Sequence Documentation:

Alignment of: HUMANK_P22 (SEQ ID NO:569)×Q8N604 (SEQ ID NO:630) ••

Alignment segment 1/1:

Alignment:

Sequence name: AAH07930 (SEQ ID NO:631)

Sequence Documentation:

Alignment of: HUMANK_P23 (SEQ ID NO:570)×AAH07930 (SEQ ID NO:631) ••

Alignment segment 1/1:

Alignment:

Sequence name: Q8N604 (SEQ ID NO:630)

Sequence Documentation:

Alignment of: HUMANK_P23 (SEQ ID NO:570)×Q8N604 (SEQ ID NO:630) ••

Alignment segment 1/1:

Alignment:

Sequence name: AAH07930 (SEQ ID NO:631)

Sequence Documentation:

Alignment of: HUMANK_P27 (SEQ ID NO:571)×AAH07930 (SEQ ID NO:631) ••

Alignment segment 1/1:

Alignment:

Sequence name: Q8N604 (SEQ ID NO:630)

Sequence Documentation:

Alignment of: HUMANK_P27 (SEQ ID NO:571)×Q8N604 (SEQ ID NO:630) ••

Alignment segment 1/1:

Alignment:

Sequence name: AAH07930 (SEQ ID NO:631)

Sequence Documentation:

Alignment of: HUMANK_P29 (SEQ ID NO:572)×AAH07930 (SEQ ID NO:631) ••

Alignment segment 1/1:

Alignment:

Sequence name: Q8N604 (SEQ ID NO:630)

Sequence Documentation:

Alignment of: HUMANK_P29 (SEQ ID NO:572)×Q8N604 (SEQ ID NO:630).

Alignment segment 1/1:

Alignment:

Sequence name: AAH07930 (SEQ ID NO:631)

Sequence Documentation:

Alignment of: HUMANK_P33 (SEQ ID NO:573)×AAH07930 (SEQ ID NO:631) ••

Alignment segment 1/1:

Alignment:

Sequence name: Q8N604 (SEQ ID NO:630)

Sequence Documentation:

Alignment of: HUMANK_P33 (SEQ ID NO:573)×Q8N604 (SEQ ID NO:630) ••

Alignment segment 1/1:

Alignment:

Sequence name: AAH07930 (SEQ ID NO:631)

Sequence Documentation:

Alignment of: HUMANK_P34 (SEQ ID NO:574)×AAH07930 (SEQ ID NO:631) ••

Alignment segment 1/1:

Alignment:

Sequence name: Q8N604 (SEQ ID NO:630)

Sequence Documentation:

Alignment of: HUMANK_P34 (SEQ ID NO:574)×Q8N604 (SEQ ID NO:630) ••

Alignment segment 1/1:

Alignment:

Description for Cluster Z39819

[1656] Cluster Z39819 features 1 transcript(s) and 10 segment(s) of interest, the names for which are given in Tables 1 and 2, respectively, the sequences themselves are given at the end of the application. The selected protein variants are given in table 3.

[1657] These sequences are variants of the known protein GDNF family receptor alpha 2 precursor (SwissProt accession identifier GFR2_HUMAN; known also according to the synonyms GFR-alpha 2; Neurturin receptor alpha; NTNR-alpha; NRTNR-alpha; TGF-beta related neurotrophic factor receptor 2; GDNF receptor beta; GDNFR-beta; RET ligand 2), SEQ ID NO:632, referred to herein as the previously known protein.

[1658] Protein GDNF family receptor alpha 2 precursor (SEQ ID NO:632) is known or believed to have the following function(s): Receptor for neurturin. Mediates the NRTN-induced autophosphorylation and activation of the RET receptor. Also able to mediate GDNF signaling through the RET tyrosine kinase receptor. The sequence for protein GDNF family receptor alpha 2 precursor is given at the end of the application, as “GDNF family receptor alpha 2 precursor amino acid sequence”. Known polymorphisms for this sequence are as shown in Table 4.

[1659] Protein GDNF family receptor alpha 2 precursor (SEQ ID NO:632) localization is believed to be attached to the membrane by a GPI-anchor (By similarity).

[1660] The following GO Annotation(s) apply to the previously known protein. The following annotation(s) were found: transmembrane receptor protein tyrosine kinase signaling pathway, which are annotation(s) related to Biological Process; and receptor; glial cell line-derived neurotrophic factor receptor, which are annotation(s) related to Molecular Function.

[1661] The GO assignment relies on information from one or more of the SwissProt/TremB1 Protein knowledgebase, available from <http://www.expasy.ch/sprot/>; or Locuslink, available from <http://www.ncbi.nlm.nih.gov/projects/LocusLink/>.

[1662] As noted above, cluster Z39819 features 1 transcript(s), which were listed in Table 1 above. These transcript(s) encode for protein(s) which are variant(s) of protein GDNF family receptor alpha 2 precursor (SEQ ID NO:632). A description of each variant protein according to the present invention is now provided.

[1663] Variant protein Z39819_PEA_{—}1_P6 (SEQ ID NO:575) according to the present invention has an amino acid sequence as given at the end of the application; it is encoded by transcript(s) Z39819_PEA_{—}1_T2 (SEQ ID NO:44). An alignment is given to the known protein (GDNF family receptor alpha 2 precursor (SEQ ID NO:632)) at the end of the application. One or more alignments to one or more previously published protein sequences are given at the end of the application. A brief description of the relationship of the variant protein according to the present invention to each such aligned protein is as follows:

[1664] Comparison report between Z39819_PEA_{—}1_P6 (SEQ ID NO:575) and GFR2_HUMAN (SEQ ID NO:632):

[1665] 1. An isolated chimeric polypeptide encoding for Z39819_PEA_{—}1_P6 (SEQ ID NO:575), comprising a first amino acid sequence being at least 90% homologous to MILANVFCLFFFL corresponding to amino acids 1-13 of GFR2_HUMAN (SEQ ID NO:632), which also corresponds to amino acids 1-13 of Z39819_PEA_{—}1_P6 (SEQ ID NO:575), and a second amino acid sequence being at least 70%, optionally at least 80%, preferably at least 85%, more preferably at least 90% and most preferably at least 95% homologous to a polypeptide having the sequence GPRAPRLAPPSGLCPGQ (SEQ ID NO:1520) corresponding to amino acids 14-30 of Z39819_PEA_{—}1_P6 (SEQ ID NO:575), wherein said first amino acid sequence and second amino acid sequence are contiguous and in a sequential order.

[1666] 2. An isolated polypeptide encoding for a tail of Z39819_PEA_{—}1_P6 (SEQ ID NO:575), comprising a polypeptide being at least 70%, optionally at least about 80%, preferably at least about 85%, more preferably at least about 90% and most preferably at least about 95% homologous to the sequence GPRAPRLAPPSGLCPGQ (SEQ ID NO:1520) in Z39819_PEA_{—}1_P6 (SEQ ID NO:575).

[1667] The location of the variant protein was determined according to results from a number of different software programs and analyses, including analyses from SignalP and other specialized programs. The variant protein is believed to be located as follows with regard to the cell: secreted. The protein localization is believed to be secreted because both signal-peptide prediction programs predict that this protein has a signal peptide, and neither trans-membrane region prediction program predicts that this protein has a trans-membrane region.

[1668] The glycosylation sites of variant protein Z39819_PEA_{—}1_P6 (SEQ ID NO:575), as compared to the known protein GDNF family receptor alpha 2 precursor (SEQ ID NO:632), are described in Table 5 (given according to their position(s) on the amino acid sequence in the first column; the second column indicates whether the glycosylation site is present in the variant protein; and the last column indicates whether the position is different on the variant protein).

[1669] Variant protein Z39819_PEA_{—}1_P6 (SEQ ID NO:575) is encoded by the following transcript(s): Z39819_PEA_{—}1_T2 (SEQ ID NO:44), for which the sequence(s) is/are given at the end of the application. The coding portion of transcript Z39819_PEA_{—}1_T2 (SEQ ID NO:44) is shown in bold; this coding portion starts at position 715 and ends at position 804. The transcript also has the following SNPs as listed in Table 6 (given according to their position on the nucleotide sequence, with the alternative nucleic acid listed; the last column indicates whether the SNP is known or not; the presence of known SNPs in variant protein Z39819_PEA_{—}1_P6 (SEQ ID NO:575) sequence provides support for the deduced sequence of this variant protein according to the present invention).

[1670] As noted above, cluster Z39819 features 10 segment(s), which were listed in Table 2 above and for which the sequence(s) are given at the end of the application. These segment(s) are portions of nucleic acid sequence(s) which are described herein separately because they are of particular interest. A description of each segment according to the present invention is now provided.

[1671] Segment cluster Z39819_PEA_{—}1_node_{—}2 (SEQ ID NO:307) according to the present invention is supported by 17 libraries. The number of libraries was determined as previously described. This segment can be found in the following transcript(s): Z39819_PEA_{—}1_T2 (SEQ ID NO:44). Table 7 below describes the starting and ending position of this segment on each transcript.

[1672] Segment cluster Z39819_PEA_{—}1_node_{—}6 (SEQ ID NO:308) according to the present invention is supported by 17 libraries. The number of libraries was determined as previously described. This segment can be found in the following transcript(s): Z39819_PEA_{—}1_T2 (SEQ ID NO:44). Table 8 below describes the starting and ending position of this segment on each transcript.

[1673] Segment cluster Z39819_PEA_{—}1_node_{—}10 (SEQ ID NO:309) according to the present invention is supported by 23 libraries. The number of libraries was determined as previously described. This segment can be found in the following transcript(s): Z39819_PEA_{—}1_T2 (SEQ ID NO:44). Table 9 below describes the starting and ending position of this segment on each transcript.

[1674] Segment cluster Z39819_PEA_{—}1_node_{—}14 (SEQ ID NO:310) according to the present invention is supported by 25 libraries. The number of libraries was determined as previously described. This segment can be found in the following transcript(s): Z39819_PEA_{—}1_T2 (SEQ ID NO:44). Table 10 below describes the starting and ending position of this segment on each transcript.

[1675] Segment cluster Z39819_PEA_{—}1_node_{—}16 (SEQ ID NO:311) according to the present invention is supported by 26 libraries. The number of libraries was determined as previously described. This segment can be found in the following transcript(s): Z39819_PEA_{—}1_T2 (SEQ ID NO:44). Table 11 below describes the starting and ending position of this segment on each transcript.

[1676] Segment cluster Z39819_PEA_{—}1_node_{—}21 (SEQ ID NO:312) according to the present invention is supported by 61 libraries. The number of libraries was determined as previously described. This segment can be found in the following transcript(s): Z39819_PEA_{—}1_T2 (SEQ ID NO:44). Table 12 below describes the starting and ending position of this segment on each transcript.

[1677] According to an optional embodiment of the present invention, short segments related to the above cluster are also provided. These segments are up to about 120 bp in length, and so are included in a separate description.

[1678] Segment cluster Z39819_PEA_{—}1_node_{—}3 (SEQ ID NO:313) according to the present invention is supported by 14 libraries. The number of libraries was determined as previously described. This segment can be found in the following transcript(s): Z39819_PEA_{—}1_T2 (SEQ ID NO:44). Table 13 below describes the starting and ending position of this segment on each transcript.

[1679] Segment cluster Z39819_PEA_{—}1_node_{—}8 (SEQ ID NO:314) according to the present invention is supported by 14 libraries. The number of libraries was determined as previously described. This segment can be found in the following transcript(s): Z39819_PEA_{—}1_T2 (SEQ ID NO:44). Table 14 below describes the starting and ending position of this segment on each transcript.

[1680] Segment cluster Z39819_PEA_{—}1_node_{—}12 (SEQ ID NO:315) according to the present invention is supported by 20 libraries. The number of libraries was determined as previously described. This segment can be found in the following transcript(s): Z39819_PEA_{—}1_T2 (SEQ ID NO:44). Table 15 below describes the starting and ending position of this segment on each transcript.

[1681] Segment cluster Z39819_PEA_{—}1_node_{—}19 (SEQ ID NO:316) according to the present invention is supported by 27 libraries. The number of libraries was determined as previously described. This segment can be found in the following transcript(s): Z39819_PEA_{—}1_T2 (SEQ ID NO:44. Table 16 below describes the starting and ending position of this segment on each transcript.

Variant protein alignment to the previously known protein:

Sequence name: GFR2_HUMAN (SEQ ID NO:632)

Sequence Documentation:

Alignment of: Z39819_PEA_{—}1_P6 (SEQ ID NO:575)×GFR2_HUMAN (SEQ ID NO:632) ••

Alignment segment 1/1:

Alignment:

Description for Cluster HUMCA1XIA

[1682] Cluster HUMCA1XIA features 4 transcript(s) and 46 segment(s) of interest, the names for which are given in Tables 1 and 2, respectively, the sequences themselves are given at the end of the application. The selected protein variants are given in table 3.

[1683] These sequences are variants of the known protein Collagen alpha 1 (SwissProt accession identifier CA1B_HUMAN; known also according to the synonyms XI), SEQ ID NO: 633, referred to herein as the previously known protein.

[1684] Protein Collagen alpha 1 (SEQ ID NO:633) is known or believed to have the following function(s): May play an important role in fibrillogenesis by controlling lateral growth of collagen II fibrils. The sequence for protein Collagen alpha 1 is given at the end of the application, as “Collagen alpha 1 amino acid sequence”. Known polymorphisms for this sequence are as shown in Table 4.

[1685] The following GO Annotation(s) apply to the previously known protein. The following annotation(s) were found: cartilage condensation; vision; hearing; cell-cell adhesion; extracellular matrix organization and biogenesis, which are annotation(s) related to Biological Process; extracellular matrix structural protein; extracellular matrix protein, adhesive, which are annotation(s) related to Molecular Function; and extracellular matrix; collagen; collagen type XI, which are annotation(s) related to Cellular Component.

[1686] The GO assignment relies on information from one or more of the SwissProt/TremB1 Protein knowledgebase, available from <http://www.expasy.ch/sprot/>; or Locuslink, available from <http://www.ncbi.nlm.nih.gov/projects/LocusLink/>.

[1687] Cluster HUMCA1XIA can be used as a diagnostic marker according to overexpression of transcripts of this cluster in cancer. Expression of such transcripts in normal tissues is also given according to the previously described methods. The term “number” in the left hand column of the table and the numbers on the y-axis of the figure below refer to weighted expression of ESTs in each category, as “parts per million” (ratio of the expression of ESTs for a particular cluster to the expression of all ESTs in that category, according to parts per million).

[1688] Overall, the following results were obtained as shown with regard to the histograms in FIG. 24 and Table 5. This cluster is overexpressed (at least at a minimum level) in the following pathological conditions: bone malignant tumors, epithelial malignant tumors, a mixture of malignant tumors from different tissues and lung malignant tumors.

[1689] As noted above, cluster HUMCA1XIA features 4 transcript(s), which were listed in Table 1 above. These transcript(s) encode for protein(s) which are variant(s) of protein Collagen alpha 1 (SEQ ID NO:633). A description of each variant protein according to the present invention is now provided.

[1690] Variant protein HUMCA1XIA_P14 (SEQ ID NO:576) according to the present invention has an amino acid sequence as given at the end of the application; it is encoded by transcript(s) HUMCA1XIA_T16 (SEQ ID NO:45). An alignment is given to the known protein (Collagen alpha 1 (SEQ ID NO:633)) at the end of the application. One or more alignments to one or more previously published protein sequences are given at the end of the application. A brief description of the relationship of the variant protein according to the present invention to each such aligned protein is as follows:

[1691] Comparison report between HUMCA1XIA_P14 (SEQ ID NO:576) and CA1B_HUMAN_V5 (SEQ ID NO 634):

[1692] 1. An isolated chimeric polypeptide encoding for HUMCA1XIA_P14 (SEQ ID NO:576), comprising a first amino acid sequence being at least 90% homologous to MEPWSSRWKTKRWLWDFTVTTLALTFLFQAREVRGAAPVDVLKALDFHNSPEGISKTT GFCTNRKNSKGSDTAYRVSKQAQLSAPTKQLFPGGTFPEDFSILFTVKPKKGIQSFLLSIY NEHGIQQIGVEVGRSPVFLFEDHTGKPAPEDYPLFRTVNIADGKWHRVAISVEKKTVTM IVDCKKKTTKPLDRSERAIVDTNGITVFGTRILDEEVFEGDIQQFLITGDPKAAYDYCEH YSPDCDSSAPKAAQAQEPQIDEYAPEDIIEYDYEYGEAEYKEAESVTEGPTVTEETIAQT EANIVDDFQEYNYGTMESYQTEAPRHVSGTNEPNPVEEIFTEEYLTGEDYDSQRKNSED TLYENKEIDGRDSDLLVDGDLGEYDFYEYKEYEDKPTSPPNEEFGPGVPAETDITETSIN GHGAYGEKGQKGEPAVVEPGMLVEGPPGPAGPAGIMGPPGLQGPTGPPGDPGDRGPPG RPGLPGADGLPGPPGTMLMLPFRYGGDGSKGPTISAQEAQAQAILQQARIALRGPPGPM GLTGRPGPVGGPGSSGAKGESGDPGPQGPRGVQGPPGPTGKPGKRGRPGADGGRGMP GEPGAKGDRGFDGLPGLPGDKGHRGERGPQGPPGPPGDDGMRGEDGEIGPRGLPGEAG PRGLLGPRGTPGAPGQPGMAGVDGPPGPKGNMGPQGEPGPPGQQGNPGPQGLPGPQG PIGPPGEKGPQGKPGLAGLPGADGPPGHPGKEGQSGEKGALGPPGPQGPIGYPGPRGVK GADGVRGLKGSKGEKGEDGFPGFKGDMGLKGDRGEVGQIGPRGEDGPEGPKGRAGPT GDPGPSGQAGEKGKLGVPGLPGYPGRQGPKGSTGFPGFPGANGEKGARGVAGKPGPR GQRGPTGPRGSRGARGPTGKPGPKGTSGGDGPPGPPGERGPQGPQGPVGFPGPKGPPGP PGKDGLPGHPGQRGETGFQGKTGPPGPGGVVGPQGPTGETGPIGERGHPGPPGPPGEQG LPGAAGKEGAKGDPGPQGISGKDGPAGLRGFPGERGLPGAQGAPGLKGGEGPQGPPGP V corresponding to amino acids 1-1056 of CA1B_HUMAN_V5(SEQ ID NO:634), which also corresponds to amino acids 1-1056 of HUMCA1XIA_P14 (SEQ ID NO:576), and a second amino acid sequence being at least 70%, optionally at least 80%, preferably at least 85%, more preferably at least 90% and most preferably at least 95% homologous to a polypeptide having the sequence VSMMIINSQTIMVVNYSSSFITLML (SEQ ID NO:1521) corresponding to amino acids 1057-1081 of HUMCA1XIA_P14 (SEQ ID NO:576), wherein said first amino acid sequence and second amino acid sequence are contiguous and in a sequential order.

[1693] 2. An isolated polypeptide encoding for a tail of HUMCA1XIA_P14 (SEQ ID NO:576), comprising a polypeptide being at least 70%, optionally at least about 80%, preferably at least about 85%, more preferably at least about 90% and most preferably at least about 95% homologous to the sequence VSMMIINSQTIMVVNYSSSFITLML (SEQ ID NO:1521) in HUMCA1XIA_P14 (SEQ ID NO:576).

[1694] It should be noted that the known protein sequence (CA1B_HUMAN (SEQ ID NO:633) has one or more changes than the sequence given at the end of the application and named as being the amino acid sequence for CA1B_HUMAN_V5 (SEQ ID NO:634). These changes were previously known to occur and are listed in the table below.

[1695] The location of the variant protein was determined according to results from a number of different software programs and analyses, including analyses from SignalP and other specialized programs. The variant protein is believed to be located as follows with regard to the cell: secreted. The protein localization is believed to be secreted because both signal-peptide prediction programs predict that this protein has a signal peptide, and neither trans-membrane region prediction program predicts that this protein has a trans-membrane region.

[1696] Variant protein HUMCA1XIA_P14 (SEQ ID NO:576) also has the following non-silent SNPs (Single Nucleotide Polymorphisms) as listed in Table 8, (given according to their position(s) on the amino acid sequence, with the alternative amino acid(s) listed; the last column indicates whether the SNP is known or not; the presence of known SNPs in variant protein HUMCA1XIA_P14 (SEQ ID NO:576) sequence provides support for the deduced sequence of this variant protein according to the present invention).

[1697] Variant protein HUMCA1XIA_P14 (SEQ ID NO:576) is encoded by the following transcript(s): HUMCA1XIA_T16 (SEQ ID NO:45, for which the sequence(s) is/are given at the end of the application. The coding portion of transcript HUMCA1XIA_T16 (SEQ ID NO:45) is shown in bold; this coding portion starts at position 319 and ends at position 3561. The transcript also has the following SNPs as listed in Table 9 (given according to their position on the nucleotide sequence, with the alternative nucleic acid listed; the last column indicates whether the SNP is known or not; the presence of known SNPs in variant protein HUMCA1XIA_P14 (SEQ ID NO:576) sequence provides support for the deduced sequence of this variant protein according to the present invention).

[1698] Variant protein HUMCA1XIA_P15 (SEQ ID NO:577) according to the present invention has an amino acid sequence as given at the end of the application; it is encoded by transcript(s) HUMCA1XIA_T17 (SEQ ID NO:46). An alignment is given to the known protein (Collagen alpha 1 (SEQ ID NO:633)) at the end of the application. One or more alignments to one or more previously published protein sequences are given at the end of the application. A brief description of the relationship of the variant protein according to the present invention to each such aligned protein is as follows:

[1699] Comparison report between HUMCA1XIA_P15 (SEQ ID NO:577) and CA1B_HUMAN (SEQ ID NO:633):

[1700] 1. An isolated chimeric polypeptide encoding for HUMCA1XIA_P15 (SEQ ID NO:577), comprising a first amino acid sequence being at least 90% homologous to MEPWSSRWKTKRWLWDFTVTTLALTFLFQAREVRGAAPVDVLKALDFHNSPEGISKTT GFCTNRKNSKGSDTAYRVSKQAQLSAPTKQLFPGGTFPEDFSILFTVKPKKGIQSFLLSIY NEHGIQQIGVEVGRSPVFLFEDHTGKPAPEDYPLFRTVNIADGKWHRVAISVEKKTVTM IVDCKKKTTKPLDRSERAIVDTNGITVFGTRILDEEVFEGDIQQFLITGDPKAAYDYCEH YSPDCDSSAPKAAQAQEPQIDEYAPEDIIEYDYEYGEAEYKEAESVTEGPTVTEETIAQT EANIVDDFQEYNYGTMESYQTEAPRHVSGTNEPNPVEEIFTEEYLTGEDYDSQRKNSED TLYENKEIDGRDSDLLVDGDLGEYDFYEYKEYEDKPTSPPNEEFGPGVPAETDITETSIN GHGAYGEKGQKGEPAVVEPGMLVEGPPGPAGPAGIMGPPGLQGPTGPPGDPGDRGPPG RPGLPGADGLPGPPGTMLMLPFRYGGDGSKGPTISAQEAQAQAILQQARIALRGPPGPM GLTGRPGPVGGPGSSGAKGESGDPGPQGPRGVQGPPGPTGKPGKRGRPGADGGRGMP GEPGAKGDRGFDGLPGLPGDKGHRGERGPQGPPGPPGDDGMRGEDGEIGPRGLPGEAG PRGLLGPRGTPGAPGQPGMAGVDGPPGPKGNMGPQGEPGPPGQQGNPGPQGLPGPQG PIGPPGEK corresponding to amino acids 1-714 of CA1B_HUMAN (SEQ ID NO:633) which also corresponds to amino acids 1-714 of HUMCA1XIA_P15 (SEQ ID NO:577), and a second amino acid sequence being at least 70%, optionally at least 80%, preferably at least 85%, more preferably at least 90% and most preferably at least 95% homologous to a polypeptide having the sequence MCCNLSFGILIPLQK (SEQ ID NO:1522) corresponding to amino acids 715-729 of HUMCA1XIA_P15 (SEQ ID NO:577), wherein said first amino acid sequence and second amino acid sequence are contiguous and in a sequential order.

[1701] 2. An isolated polypeptide encoding for a tail of HUMCA1XIA_P15 (SEQ ID NO:577), comprising a polypeptide being at least 70%, optionally at least about 80%, preferably at least about 85%, more preferably at least about 90% and most preferably at least about 95% homologous to the sequence MCCNLSFGILIPLQK (SEQ ID NO:1522) in HUMCA1XIA_P15 (SEQ ID NO:577).

[1702] The location of the variant protein was determined according to results from a number of different software programs and analyses, including analyses from SignalP and other specialized programs. The variant protein is believed to be located as follows with regard to the cell: secreted. The protein localization is believed to be secreted because both signal-peptide prediction programs predict that this protein has a signal peptide, and neither trans-membrane region prediction program predicts that this protein has a trans-membrane region.

[1703] Variant protein HUMCA1XIA_P15 (SEQ ID NO:577) also has the following non-silent SNPs (Single Nucleotide Polymorphisms) as listed in Table 10, (given according to their position(s) on the amino acid sequence, with the alternative amino acid(s) listed; the last column indicates whether the SNP is known or not; the presence of known SNPs in variant protein HUMCA1XIA_P15 (SEQ ID NO:577) sequence provides support for the deduced sequence of this variant protein according to the present invention).

[1704] The glycosylation sites of variant protein HUMCA1XIA_P15 (SEQ ID NO:577), as compared to the known protein Collagen alpha 1 (SEQ ID NO:633), are described in Table 11 (given according to their position(s) on the amino acid sequence in the first column; the second column indicates whether the glycosylation site is present in the variant protein; and the last column indicates whether the position is different on the variant protein).

[1705] Variant protein HUMCA1XIA_P15 (SEQ ID NO:577) is encoded by the following transcript(s): HUMCA1XIA_T17 (SEQ ID NO:46, for which the sequence(s) is/are given at the end of the application. The coding portion of transcript HUMCA1XIA_T17 (SEQ ID NO:46) is shown in bold; this coding portion starts at position 319 and ends at position 2505. The transcript also has the following SNPs as listed in Table 12 (given according to their position on the nucleotide sequence, with the alternative nucleic acid listed; the last column indicates whether the SNP is known or not; the presence of known SNPs in variant protein HUMCA1XIA_P15 (SEQ ID NO:577) sequence provides support for the deduced sequence of this variant protein according to the present invention).

[1706] Variant protein HUMCA1XIA_P16 (SEQ ID NO:578) according to the present invention has an amino acid sequence as given at the end of the application; it is encoded by transcript(s) HUMCA1XIA_T19 (SEQ ID NO:47). An alignment is given to the known protein (Collagen alpha 1 (SEQ ID NO:633)) at the end of the application. One or more alignments to one or more previously published protein sequences are given at the end of the application. A brief description of the relationship of the variant protein according to the present invention to each such aligned protein is as follows:

[1707] Comparison report between HUMCA1XIA_P16 (SEQ ID NO:578) and CA1B_HUMAN (SEQ ID NO:633):

[1708] 1. An isolated chimeric polypeptide encoding for HUMCA1XIA_P16 (SEQ ID NO:578), comprising a first amino acid sequence being at least 90% homologous to MEPWSSRWKTKRWLWDFTVTTLALTFLFQAREVRGAAPVDVLKALDFHNSPEGISKTT GFCTNRKNSKGSDTAYRVSKQAQLSAPTKQLFPGGTFPEDFSILFTVKPKKGIQSFLLSIY NEHGIQQIGVEVGRSPVFLFEDHTGKPAPEDYPLFRTVNIADGKWHRVAISVEKKTVTM IVDCKKKTTKPLDRSERAIVDTNGITVFGTRILDEEVFEGDIQQFLITGDPKAAYDYCEH YSPDCDSSAPKAAQAQEPQIDEYAPEDIIEYDYEYGEAEYKEAESVTEGPTVTEETIAQT EANIVDDFQEYNYGTMESYQTEAPRHVSGTNEPNPVEEIFTEEYLTGEDYDSQRKNSED TLYENKEIDGRDSDLLVDGDLGEYDFYEYKEYEDKPTSPPNEEFGPGVPAETDITETSIN GHGAYGEKGQKGEPAVVEPGMLVEGPPGPAGPAGIMGPPGLQGPTGPPGDPGDRGPPG RPGLPGADGLPGPPGTMLMLPFRYGGDGSKGPTISAQEAQAQAILQQARIALRGPPGPM GLTGRPGPVGGPGSSGAKGESGDPGPQGPRGVQGPPGPTGKPGKRGRPGADGGRGMP GEPGAKGDRGFDGLPGLPGDKGHRGERGPQGPPGPPGDDGMRGEDGEIGPRGLPGEA corresponding to amino acids 1-648 of CA1B_HUMAN (SEQ ID NO:633), which also corresponds to amino acids 1-648 of HUMCA1XIA_P16 (SEQ ID NO:578), a second amino acid sequence being at least 90% homologous to GMAGVDGPPGPKGNMGPQGEPGPPGQQGNPGPQGLPGPQGPIGPPGEK corresponding to amino acids 667-714 of CA1B_HUMAN (SEQ ID NO:633), which also corresponds to amino acids 649-696 of HUMCA1XIA_P16 (SEQ ID NO:578), and a third amino acid sequence being at least 70%, optionally at least 80%, preferably at least 85%, more preferably at least 90% and most preferably at least 95% homologous to a polypeptide having the sequence VSFSFSLFYKKVIKFACDKRFVGRHDERKVVKLSLPLYLIYE (SEQ ID NO:1523) corresponding to amino acids 697-738 of HUMCA1XIA_P16 (SEQ ID NO:578), wherein said first amino acid sequence, second amino acid sequence and third amino acid sequence are contiguous and in a sequential order.

[1709] 2. An isolated chimeric polypeptide encoding for an edge portion of HUMCA1XIA_P16 (SEQ ID NO:578), comprising a polypeptide having a length “n”, wherein n is at least about 10 amino acids in length, optionally at least about 20 amino acids in length, preferably at least about 30 amino acids in length, more preferably at least about 40 amino acids in length and most preferably at least about 50 amino acids in length, wherein at least two amino acids comprise AG, having a structure as follows: a sequence starting from any of amino acid numbers 648−x to 648; and ending at any of amino acid numbers 649+((n−2)−x), in which x varies from 0 to n−2.

[1710] 3. An isolated polypeptide encoding for a tail of HUMCA1XIA_P16 (SEQ ID NO:578), comprising a polypeptide being at least 70%, optionally at least about 80%, preferably at least about 85%, more preferably at least about 90% and most preferably at least about 95% homologous to the sequence VSFSFSLFYKKVIKFACDKRFVGRHDERKVVKLSLPLYLIYE (SEQ ID NO:1523) in HUMCA1XIA_P16 (SEQ ID NO:578).

[1711] The location of the variant protein was determined according to results from a number of different software programs and analyses, including analyses from SignalP and other specialized programs. The variant protein is believed to be located as follows with regard to the cell: secreted. The protein localization is believed to be secreted because both signal-peptide prediction programs predict that this protein has a signal peptide, and neither trans-membrane region prediction program predicts that this protein has a trans-membrane region.

[1712] Variant protein HUMCA1XIA_P16 (SEQ ID NO:578) also has the following non-silent SNPs (Single Nucleotide Polymorphisms) as listed in Table 13, (given according to their position(s) on the amino acid sequence, with the alternative amino acid(s) listed; the last column indicates whether the SNP is known or not; the presence of known SNPs in variant protein HUMCA1XIA_P16 (SEQ ID NO:578) sequence provides support for the deduced sequence of this variant protein according to the present invention).

[1713] The glycosylation sites of variant protein HUMCA1XIA_P16 (SEQ ID NO:578), as compared to the known protein Collagen alpha 1 (SEQ ID NO:633), are described in Table 14 (given according to their position(s) on the amino acid sequence in the first column; the second column indicates whether the glycosylation site is present in the variant protein; and the last column indicates whether the position is different on the variant protein).

[1714] Variant protein HUMCA1XIA_P16 (SEQ ID NO:578) is encoded by the following transcript(s): HUMCA1XIA_T19-(SEQ ID NO:47, for which the sequence(s) is/are given at the end of the application. The coding portion of transcript HUMCA1XIA_T19 (SEQ ID NO:47) is shown in bold; this coding portion starts at position 319 and ends at position 2532. The transcript also has the following SNPs as listed in Table 15 (given according to their position on the nucleotide sequence, with the alternative nucleic acid listed; the last column indicates whether the SNP is known or not; the presence of known SNPs in variant protein HUMCA1XIA_P16 (SEQ ID NO:578) sequence provides support for the deduced sequence of this variant protein according to the present invention).

[1715] Variant protein HUMCA1XIA_P17 (SEQ ID NO:579) according to the present invention has an amino acid sequence as given at the end of the application; it is encoded by transcript(s) HUMCA1XIA_T20 (SEQ ID NO:48). An alignment is given to the known protein (Collagen alpha 1 (SEQ ID NO:633)) at the end of the application. One or more alignments to one or more previously published protein sequences are given at the end of the application. A brief description of the relationship of the variant protein according to the present invention to each such aligned protein is as follows:

[1716] Comparison report between HUMCA1XIA_P17 (SEQ ID NO:579) and CA1B_HUMAN (SEQ ID NO:633):

[1717] 1. An isolated chimeric polypeptide encoding for HUMCA1XIA_P17 (SEQ ID NO:579), comprising a first amino acid sequence being at least 90% homologous to MEPWSSRWKTKRWLWDFTVTTLALTFLFQAREVRGAAPVDVLKALDFHNSPEGISKTT GFCTNRKNSKGSDTAYRVSKQAQLSAPTKQLFPGGTFPEDFSILFTVKPKKGIQSFLLSIY NEHGIQQIGVEVGRSPVFLFEDHTGKPAPEDYPLFRTVNIADGKWHRVAISVEKKTVTM IVDCKKKTTKPLDRSERAIVDTNGITVFGTRILDEEVFEGDIQQFLITGDPKAAYDYCEH YSPDCDSSAPKAAQAQEPQIDE corresponding to amino acids 1-260 of CA1B_HUMAN (SEQ ID NO:633), which also corresponds to amino acids 1-260 of HUMCA1XIA_P17 (SEQ ID NO:579), and a second amino acid sequence being at least 70%, optionally at least 80%, preferably at least 85%, more preferably at least 90% and most preferably at least 95% homologous to a polypeptide having the sequence VRSTRPEKVFVFQ (SEQ ID NO:1524) corresponding to amino acids 261-273 of HUMCA1XIA_P17 (SEQ ID NO:579), wherein said first amino acid sequence and second amino acid sequence are contiguous and in a sequential order.

[1718] 2. An isolated polypeptide encoding for a tail of HUMCA1XIA_P17 (SEQ ID NO:579), comprising a polypeptide being at least 70%, optionally at least about 80%, preferably at least about 85%, more preferably at least about 90% and most preferably at least about 95% homologous to the sequence VRSTRPEKVFVFQ (SEQ ID NO:1524) in HUMCA1XIA_P17 (SEQ ID NO:579).

[1719] The location of the variant protein was determined according to results from a number of different software programs and analyses, including analyses from SignalP and other specialized programs. The variant protein is believed to be located as follows with regard to the cell: secreted. The protein localization is believed to be secreted because both signal-peptide prediction programs predict that this protein has a signal peptide, and neither trans-membrane region prediction program predicts that this protein has a trans-membrane region.

[1720] Variant protein HUMCA1XIA_P17 (SEQ ID NO:579) also has the following non-silent SNPs (Single Nucleotide Polymorphisms) as listed in Table 16, (given according to their position(s) on the amino acid sequence, with the alternative amino acid(s) listed; the last column indicates whether the SNP is known or not; the presence of known SNPs in variant protein HUMCA1XIA_P17 (SEQ ID NO:579) sequence provides support for the deduced sequence of this variant protein according to the present invention).

[1721] The glycosylation sites of variant protein HUMCA1XIA_P17 (SEQ ID NO:579), as compared to the known protein Collagen alpha 1 (SEQ ID NO:633), are described in Table 17 (given according to their position(s) on the amino acid sequence in the first column; the second column indicates whether the glycosylation site is present in the variant protein; and the last column indicates whether the position is different on the variant protein).

[1722] Variant protein HUMCA1XIA_P17 (SEQ ID NO:579) is encoded by the following transcript(s): HUMCA1XIA_T20 (SEQ ID NO:48), for which the sequence(s) is/are given at the end of the application. The coding portion of transcript HUMCA1XIA_T20 (SEQ ID NO:48) is shown in bold; this coding portion starts at position 319 and ends at position 1137. The transcript also has the following SNPs as listed in Table 18 (given according to their position on the nucleotide sequence, with the alternative nucleic acid listed; the last column indicates whether the SNP is known or not; the presence of known SNPs in variant protein HUMCA1XIA_P17 (SEQ ID NO:579) sequence provides support for the deduced sequence of this variant protein according to the present invention).

[1723] As noted above, cluster HUMCA1XIA features 46 segment(s), which were listed in Table 2 above and for which the sequence(s) are given at the end of the application. These segment(s) are portions of nucleic acid sequence(s) which are described herein separately because they are of particular interest. A description of each segment according to the present invention is now provided.

[1724] Segment cluster HUMCA1XIA_node_{—}0 (SEQ ID NO:317) according to the present invention is supported by 13 libraries. The number of libraries was determined as previously described. This segment can be found in the following transcript(s): HUMCA1XIA_T16 (SEQ ID NO:45), HUMCA1XIA_T17 (SEQ ID NO:46, HUMCA1XIA_T19 (SEQ ID NO:47) and HUMCA1XIA_T20 (SEQ ID NO:48). Table 19 below describes the starting and ending position of this segment on each transcript.

[1725] Segment cluster HUMCA1XIA_node_{—}2 (SEQ ID NO:318) according to the present invention is supported by 9 libraries. The number of libraries was determined as previously described. This segment can be found in the following transcript(s): HUMCA1XIA_T16 (SEQ ID NO:45), HUMCA1XIA_T17 (SEQ ID NO:46, HUMCA1XIA_T19 (SEQ ID NO:47) and HUMCA1XIA_T20 (SEQ ID NO:48). Table 20 below describes the starting and ending position of this segment on each transcript.

[1726] Segment cluster HUMCA1XIA_node_{—}4 (SEQ ID NO:319) according to the present invention is supported by 5 libraries. The number of libraries was determined as previously described. This segment can be found in the following transcript(s): HUMCA1XIA_T16 (SEQ ID NO:45), HUMCA1XIA_T17 (SEQ ID NO:46, HUMCA1XIA_T19 (SEQ ID NO:47) and HUMCA1XIA_T20 (SEQ ID NO:48). Table 21 below describes the starting and ending position of this segment on each transcript.

[1727] Microarray (chip) data is also available for this segment as follows. As described above with regard to the cluster itself, various oligonucleotides were tested for being differentially expressed in various disease conditions, particularly cancer. The following oligonucleotides were found to hit this segment (in relation to colon cancer), shown in Table 22.

[1728] Segment cluster HUMCA1XIA_node_{—}6 (SEQ ID NO:320) according to the present invention is supported by 5 libraries. The number of libraries was determined as previously described. This segment can be found in the following transcript(s): HUMCA1XIA_T16 (SEQ ID NO:45), HUMCA1XIA_T17 (SEQ ID NO:46, HUMCA1XIA_T19 (SEQ ID NO:47) and HUMCA1XIA_T20 (SEQ ID NO:48). Table 23 below describes the starting and ending position of this segment on each transcript.

[1729] Microarray (chip) data is also available for this segment as follows. As described above with regard to the cluster itself, various oligonucleotides were tested for being differentially expressed in various disease conditions, particularly cancer. The following oligonucleotides were found to hit this segment, shown in Table 24.

[1730] Segment cluster HUMCA1XIA_node_{—}8 (SEQ ID NO:321) according to the present invention is supported by 5 libraries. The number of libraries was determined as previously described. This segment can be found in the following transcript(s): HUMCA1XIA_T16 (SEQ ID NO:45), HUMCA1XIA_T17 (SEQ ID NO:46), HUMCA1XIA_T19 (SEQ ID NO:47) and HUMCA1XIA_T20 (SEQ ID NO:48). Table 25 below describes the starting and ending position of this segment on each transcript.

[1731] Segment cluster HUMCA1XIA_node_{—}9 (SEQ ID NO:322) according to the present invention is supported by 2 libraries. The number of libraries was determined as previously described. This segment can be found in the following transcript(s): HUMCA1XIA_T20 (SEQ ID NO:48). Table 26 below describes the starting and ending position of this segment on each transcript.

[1732] Segment cluster HUMCA1XIA_node_{—}18 (SEQ ID NO:323) according to the present invention is supported by 6 libraries. The number of libraries was determined as previously described. This segment can be found in the following transcript(s): HUMCA1XIA_T16 (SEQ ID NO:45), HUMCA1XIA_T17 (SEQ ID NO:46) and HUMCA1XIA_T19 (SEQ ID NO:47). Table 27 below describes the starting and ending position of this segment on each transcript.

[1733] Segment cluster HUMCA1XIA_node_{—}54 (SEQ ID NO:324) according to the present invention is supported by 2 libraries. The number of libraries was determined as previously described. This segment can be found in the following transcript(s): HUMCA1XIA_T19 (SEQ ID NO:47). Table 28 below describes the starting and ending position of this segment on each transcript.

[1734] Segment cluster HUMCA1XIA_node_{—}55 (SEQ ID NO:325) according to the present invention is supported by 4 libraries. The number of libraries was determined as previously described. This segment can be found in the following transcript(s): HUMCA1XIA_T17 (SEQ ID NO:46) and HUMCA1XIA_T19 (SEQ ID NO:47). Table 29 below describes the starting and ending position of this segment on each transcript.

[1735] Segment cluster HUMCA1XIA_node_{—}92 (SEQ ID NO:326) according to the present invention is supported by 2 libraries. The number of libraries was determined as previously described. This segment can be found in the following transcript(s): HUMCA1XIA_T16 (SEQ ID NO:45). Table 31 below describes the starting and ending position of this segment on each transcript.

[1736] According to an optional embodiment of the present invention, short segments related to the above cluster are also provided. These segments are up to about 120 bp in length, and so are included in a separate description.

[1737] Segment cluster HUMCA1XIA_node_{—}11 (SEQ ID NO:327) according to the present invention is supported by 3 libraries. The number of libraries was determined as previously described. This segment can be found in the following transcript(s): HUMCA1XIA_T16 (SEQ ID NO:45, HUMCA1XIA_T17 (SEQ ID NO:46) and HUMCA1XIA_T19 (SEQ ID NO:47). Table 32 below describes the starting and ending position of this segment on each transcript.

[1738] Segment cluster HUMCA1XIA_node_{—}15 (SEQ ID NO:328) according to the present invention is supported by 5 libraries. The number of libraries was determined as previously described. This segment can be found in the following transcript(s): HUMCA1XIA_T16 (SEQ ID NO:45), HUMCA1XIA_T17 (SEQ ID NO:46) and HUMCA1XIA_T19 (SEQ ID NO:47). Table 33 below describes the starting and ending position of this segment on each transcript.

[1739] Segment cluster HUMCA1XIA_node_{—}19 (SEQ ID NO:329) according to the present invention is supported by 3 libraries. The number of libraries was determined as previously described. This segment can be found in the following transcript(s): HUMCA1XIA_T16 (SEQ ID NO:45), HUMCA1XIA_T17 (SEQ ID NO:46) and HUMCA1XIA_T19 (SEQ ID NO:47). Table 34 below describes the starting and ending position of this segment on each transcript.

[1740] Segment cluster HUMCA1XIA_node_{—}21 (SEQ ID NO:330) according to the present invention is supported by 2 libraries. The number of libraries was determined as previously described. This segment can be found in the following transcript(s): HUMCA1XIA_T16 (SEQ ID NO:45), HUMCA1XIA_T17 (SEQ ID NO:46) and HUMCA1XIA_T19 (SEQ ID NO:47). Table 35 below describes the starting and ending position of this segment on each transcript.

[1741] Segment cluster HUMCA1XIA_node_{—}23 (SEQ ID NO:331) according to the present invention is supported by 3 libraries. The number of libraries was determined as previously described. This segment can be found in the following transcript(s): HUMCA1XIA_T16 (SEQ ID NO:45), HUMCA1XIA_T17 (SEQ ID NO:46) and HUMCA1XIA_T19 (SEQ ID NO:47). Table 36 below describes the starting and ending position of this segment on each transcript.

[1742] Segment cluster HUMCA1XIA_node_{—}25 (SEQ ID NO:332) according to the present invention is supported by 3 libraries. The number of libraries was determined as previously described. This segment can be found in the following transcript(s): HUMCA1XIA_T16 (SEQ ID NO:45), HUMCA1XIA_T17 (SEQ ID NO:46) and HUMCA1XIA_T19 (SEQ ID NO:47). Table 37 below describes the starting and ending position of this segment on each transcript.

[1743] Segment cluster HUMCA1XIA_node_{—}27 (SEQ ID NO:333) according to the present invention is supported by 2 libraries. The number of libraries was determined as previously described. This segment can be found in the following transcript(s): HUMCA1XIA_T16 (SEQ ID NO:45, HUMCA1XIA_T17 (SEQ ID NO:46) and HUMCA1XIA_T19 (SEQ ID NO:47). Table 38 below describes the starting and ending position of this segment on each transcript.

[1744] Segment cluster HUMCA1XIA_node_{—}29 (SEQ ID NO:334) according to the present invention is supported by 3 libraries. The number of libraries was determined as previously described. This segment can be found in the following transcript(s): HUMCA1XIA_T16 (SEQ ID NO:45), HUMCA1XIA_T17 (SEQ ID NO:46) and HUMCA1XIA_T19 (SEQ ID NO:47). Table 39 below describes the starting and ending position of this segment on each transcript.

[1745] Segment cluster HUMCA1XIA_node_{—}31 (SEQ ID NO:335) according to the present invention is supported by 3 libraries. The number of libraries was determined as previously described. This segment can be found in the following transcript(s): HUMCA1XIA_T16 (SEQ ID NO:45), HUMCA1XIA_T17 (SEQ ID NO:46) and HUMCA1XIA_T19 (SEQ ID NO:47). Table 40 below describes the starting and ending position of this segment on each transcript.

[1746] Segment cluster HUMCA1XIA_node_{—}33 (SEQ ID NO:336) according to the present invention is supported by 3 libraries. The number of libraries was determined as previously described. This segment can be found in the following transcript(s): HUMCA1XIA_T16 (SEQ ID NO:45), HUMCA1XIA_T17 (SEQ ID NO:46) and HUMCA1XIA_T19 (SEQ ID NO:47). Table 41 below describes the starting and ending position of this segment on each transcript.

[1747] Segment cluster HUMCA1XIA_node_{—}35 (SEQ ID NO:337) according to the present invention is supported by 4 libraries. The number of libraries was determined as previously described. This segment can be found in the following transcript(s): HUMCA1XIA_T16 (SEQ ID NO:45), HUMCA1XIA_T17 (SEQ ID NO:46) and HUMCA1XIA_T19 (SEQ ID NO:47). Table 42 below describes the starting and ending position of this segment on each transcript.

[1748] Segment cluster HUMCA1XIA_node_{—}37 (SEQ ID NO:338) according to the present invention is supported by 4 libraries. The number of libraries was determined as previously described. This segment can be found in the following transcript(s): HUMCA1XIA_T16 (SEQ ID NO:45), HUMCA1XIA_T17 (SEQ ID NO:46) and HUMCA1XIA_T19 (SEQ ID NO:47). Table 43 below describes the starting and ending position of this segment on each transcript.

[1749] Segment cluster HUMCA1XIA_node_{—}39 (SEQ ID NO:339) according to the present invention is supported by 5 libraries. The number of libraries was determined as previously described. This segment can be found in the following transcript(s): HUMCA1XIA_T16 (SEQ ID NO:45), HUMCA1XIA_T17 (SEQ ID NO:46) and HUMCA1XIA_T19 (SEQ ID NO:47). Table 44 below describes the starting and ending position of this segment on each transcript.

[1750] Segment cluster HUMCA1XIA_node_{—}41 (SEQ ID NO:340) according to the present invention is supported by 4 libraries. The number of libraries was determined as previously described. This segment can be found in the following transcript(s): HUMCA1XIA_T16 (SEQ ID NO:45), HUMCA1XIA_T17 (SEQ ID NO:46) and HUMCA1XIA_T19 (SEQ ID NO:47). Table 45 below describes the starting and ending position of this segment on each transcript.

[1751] Segment cluster HUMCA1XIA_node_{—}43 (SEQ ID NO:341) according to the present invention is supported by 5 libraries. The number of libraries was determined as previously described. This segment can be found in the following transcript(s): HUMCA1XIA_T16 (SEQ ID NO:45), HUMCA1XIA_T17 (SEQ ID NO:46) and HUMCA1XIA_T19 (SEQ ID NO:47). Table 46 below describes the starting and ending position of this segment on each transcript.

[1752] Segment cluster HUMCA1XIA_node_{—}45 (SEQ ID NO:342) according to the present invention is supported by 4 libraries. The number of libraries was determined as previously described. This segment can be found in the following transcript(s): HUMCA1XIA_T16 (SEQ ID NO:45) and HUMCA1XIA_T17 (SEQ ID NO:46). Table 47 below describes the starting and ending position of this segment on each transcript.

[1753] Segment cluster HUMCA1XIA_node_{—}47 (SEQ ID NO:343) according to the present invention is supported by 5 libraries. The number of libraries was determined as previously described. This segment can be found in the following transcript(s): HUMCA1XIA_T16 (SEQ ID NO:45), HUMCA1XIA_T17 (SEQ ID NO:46) and HUMCA1XIA_T19 (SEQ ID NO:47). Table 48 below describes the starting and ending position of this segment on each transcript.

[1754] Segment cluster HUMCA1XIA_node_{—}49 (SEQ ID NO:344) according to the present invention is supported by 5 libraries. The number of libraries was determined as previously described. This segment can be found in the following transcript(s): HUMCA1XIA_T16 (SEQ ID NO:45), HUMCA1XIA_T17 (SEQ ID NO:46) and HUMCA1XIA_T19 (SEQ ID NO:47). Table 49 below describes the starting and ending position of this segment on each transcript.

[1755] Segment cluster HUMCA1XIA_node_{—}51 (SEQ ID NO:345) according to the present invention is supported by 7 libraries. The number of libraries was determined as previously described. This segment can be found in the following transcript(s): HUMCA1XIA_T16 (SEQ ID NO:45), HUMCA1XIA_T17 (SEQ ID NO:46) and HUMCA1XIA_T19 (SEQ ID NO:47). Table 50 below describes the starting and ending position of this segment on each transcript.

[1756] Segment cluster HUMCA1XIA_node_{—}57 (SEQ ID NO:346) according to the present invention is supported by 4 libraries. The number of libraries was determined as previously described. This segment can be found in the following transcript(s): HUMCA1XIA_T16 (SEQ ID NO:45). Table 51 below describes the starting and ending position of this segment on each transcript.

[1757] Segment cluster HUMCA1XIA_node_{—}59 (SEQ ID NO:347) according to the present invention is supported by 3 libraries. The number of libraries was determined as previously described. This segment can be found in the following transcript(s): HUMCA1XIA_T16 (SEQ ID NO:45). Table 52 below describes the starting and ending position of this segment on each transcript.

[1758] Segment cluster HUMCA1XIA_node_{—}62 (SEQ ID NO:348) according to the present invention is supported by 3 libraries. The number of libraries was determined as previously described. This segment can be found in the following transcript(s): HUMCA1XIA_T16 (SEQ ID NO:45). Table 53 below describes the starting and ending position of this segment on each transcript.

[1759] Segment cluster HUMCA1XIA_node_{—}64 (SEQ ID NO:349) according to the present invention is supported by 4 libraries. The number of libraries was determined as previously described. This segment can be found in the following transcript(s): HUMCA1XIA_T16 (SEQ ID NO:45). Table 54 below describes the starting and ending position of this segment on each transcript.

[1760] Segment cluster HUMCA1XIA_node_{—}66 (SEQ ID NO:350) according to the present invention is supported by 4 libraries. The number of libraries was determined as previously described. This segment can be found in the following transcript(s): HUMCA1XIA_T16 (SEQ ID NO:45). Table 55 below describes the starting and ending position of this segment on each transcript.

[1761] Segment cluster HUMCA1XIA_node_{—}68 (SEQ ID NO:351) according to the present invention is supported by 7 libraries. The number of libraries was determined as previously described. This segment can be found in the following transcript(s): HUMCA1XIA_T16 (SEQ ID NO:45). Table 56 below describes the starting and ending position of this segment on each transcript.

[1762] Segment cluster HUMF5A_PEA_{—}1_node_{—}57 (SEQ ID NO:283) according to the present invention is supported by 18 libraries. The number of libraries was determined as previously described. This segment can be found in the following transcript(s): HUMF5A_PEA_{—}1_T1 (SEQ ID NO:33) and HUMF5A_PEA_{—}1_T3 (SEQ ID NO:34). Table 46 below describes the starting and ending position of this segment on each transcript.

[1763] Segment cluster HUMF5A_PEA_{—}1_node_{—}59 (SEQ ID NO:284) according to the present invention can be found in the following transcript(s): HUMF5A_PEA_{—}1_T1 (SEQ ID NO:33) and HUMF5A_PEA_{—}1_T3 (SEQ ID NO:34). Table 47 below describes the starting and ending position of this segment on each transcript.

Variant protein alignment to the previously known protein:

Sequence name: FA5_HUMAN_V1 (SEQ ID NO:627)

Sequence Documentation:

Alignment of: HUMF5A_PEA_{—}1_P3 (SEQ ID NO:564)×FA5_HUMAN_V1 (SEQ ID NO:627) ••

Alignment segment 1/1:

Alignment:

Sequence name: FA5_HUMAN_V1 (SEQ ID NO:627)

Sequence Documentation:

Alignment of: HUMF5A_PEA_{—}1_P4 (SEQ ID NO:565)×FA5_HUMAN_V1 (SEQ ID NO:627) ••

Alignment segment 1/1:

Alignment:

Sequence name: FA5_HUMAN (SEQ ID NO:626)

Sequence Documentation:

Alignment of: HUMF5A_PEA_{—}1_P8 (SEQ ID NO:566)×FA5_HUMAN (SEQ ID NO:626) ••

Alignment segment 1/1:

Alignment:

PBGD-amplicon, SEQ ID NO:531HPRT1-amplicon, SEQ ID NO:612HPRT1-amplicon, SEQ ID NO:615RPS27A amplicon, SEQ ID NO:1261

Description for Cluster HUMANK

[1764] Cluster HUMANK features 8 transcript(s) and 22 segment(s) of interest, the names for which are given in Tables 1 and 2, respectively, the sequences themselves are given at the end of the application. The selected protein variants are given in table 3.

[1765] These sequences are variants of the known protein Ankyrin 1 (SwissProt accession identifier ANK1_HUMAN; known also according to the synonyms Erythrocyte ankyrin; Ankyrin R), SEQ ID NO: 628, referred to herein as the previously known protein.

[1766] Protein Ankyrin 1 (SEQ ID NO:628) is known or believed to have the following function(s): Attach integral membrane proteins to cytoskeletal elements; bind to the erythrocyte membrane protein band 4.2, to Na—K ATPase, to the lymphocyte membrane protein GP85, and to the cytoskeletal proteins fodrin, tubulin, vimentin and desmin. Erythrocyte ankyrins also link spectrin (beta chain) to the cytoplasmic domain of the erythrocytes anion exchange protein; they retain most or all of these binding functions. The sequence for protein Ankyrin 1 is given at the end of the application, as “Ankyrin 1 amino acid sequence”. Known polymorphisms for this sequence are as shown in Table 4.

[1767] Protein Ankyrin 1 (SEQ ID NO:628) localization is believed to be Cytoplasmic surface of erythrocytic plasma membrane.

[1768] The following GO Annotation(s) apply to the previously known protein. The following annotation(s) were found: exocytosis; cytoskeleton organization and biogenesis; signal transduction, which are annotation(s) related to Biological Process; structural protein; structural protein of cytoskeleton; cytoskeletal adaptor, which are annotation(s) related to Molecular Function; and cytoskeleton; plasma membrane; actin cytoskeleton; basolateral plasma membrane, which are annotation(s) related to Cellular Component.

[1769] The GO assignment relies on information from one or more of the SwissProt/TremB1 Protein knowledgebase, available from <http://www.expasy.ch/sprot/>; or Locuslink, available from <http://www.ncbi.nlm.nih.gov/projects/LocusLink/>.

[1770] Cluster HUMANK can be used as a diagnostic marker according to overexpression of transcripts of this cluster in cancer. Expression of such transcripts in normal tissues is also given according to the previously described methods. The term “number” in the left hand column of the table and the numbers on the y-axis of the figure below refer to weighted expression of ESTs in each category, as “parts per million” (ratio of the expression of ESTs for a particular cluster to the expression of all ESTs in that category, according to parts per million).

[1771] Overall, the following results were obtained as shown with regard to the histograms in FIG. 23 and Table 5. This cluster is overexpressed (at least at a minimum level) in the following pathological conditions: epithelial malignant tumors.

[1772] As noted above, cluster HUMANK features 8 transcript(s), which were listed in Table 1 above. These transcript(s) encode for protein(s) which are variant(s) of protein Ankyrin 1 (SEQ ID NO:628). A description of each variant protein according to the present invention is now provided.

[1773] Variant protein HUMANK_P12 (SEQ ID NO:567) according to the present invention has an amino acid sequence as given at the end of the application; it is encoded by transcript(s) HUMANK_T13 (SEQ ID NO:37). An alignment is given to the known protein (Ankyrin 1 (SEQ ID NO:628)) at the end of the application. One or more alignments to one or more previously published protein sequences are given at the end of the application. A brief description of the relationship of the variant protein according to the present invention to each such aligned protein is as follows:

[1774] Comparison report between HUMANK_P12 (SEQ ID NO:567) and AAH07930 (SEQ ID NO 631):

[1775] 1. An isolated chimeric polypeptide encoding for HUMANK_P12 (SEQ ID NO:567) comprising a first amino acid sequence being at least 90% homologous to MWTFVTQLLVTLVLLSFFLVSCQNVMHIVRGSLCFVLKHIHQELDKELGESEGLSDDEE TISTRVVRRRVFLKGNEFQNIPGEQVTEEQFTDEQGNIVTKKIIRKVVRQIDLSSADAAQ EHEE corresponding to amino acids 1-123 of AAH07930 (SEQ ID NO:631), which also corresponds to amino acids 1-123 of HUMANK_P12 (SEQ ID NO:567), and a second amino acid sequence being at least 70%, optionally at least 80%, preferably at least 85%, more preferably at least 90% and most preferably at least 95% homologous to a polypeptide having the sequence VTVEGPLEDPSELEVDIDYFMKHSKDHTSTPNP (SEQ ID NO:1509) corresponding to amino acids 124-156 of HUMANK_P12 (SEQ ID NO:567), wherein said first amino acid sequence and second amino acid sequence are contiguous and in a sequential order.

[1776] 2. An isolated polypeptide encoding for a tail of HUMANK_P12 (SEQ ID NO:567) comprising a polypeptide being at least 70%, optionally at least about 80%, preferably at least about 85%, more preferably at least about 90% and most preferably at least about 95% homologous to the sequence VTVEGPLEDPSELEVDIDYFMKHSKDHTSTPNP (SEQ ID NO:1509) in HUMANK_P12 (SEQ ID NO:567).

[1777] Comparison report between HUMANK_P12 (SEQ ID NO:567) and ANK1_HUMAN_V1 (SEQ ID NO 629):

[1778] 1. An isolated chimeric polypeptide encoding for HUMANK_P12 (SEQ ID NO:567) comprising a first amino acid sequence being at least 70%, optionally at least 80%, preferably at least 85%, more preferably at least 90% and most preferably at least 95% homologous to a polypeptide having the sequence MWTFVTQLLVTLVLLSFFLVSCQNVMHIVRGSLCFVLKHIHQELDKELGESEGLSDDEE TISTRVVRRRVFLK (SEQ ID NO:1510) corresponding to amino acids 1-73 of HUMANK_P12 (SEQ ID NO:567), and a second amino acid sequence being at least 90% homologous to GNEFQNIPGEQVTEEQFTDEQGNIVTKKIIRKVVRQIDLSSADAAQEHEEVTVEGPLEDP SELEVDIDYFMKHSKDHTSTPNP (SEQ ID NO:1509) corresponding to amino acids 1799-1881 of ANK1_HUMAN_V1 (SEQ ID NO:629), which also corresponds to amino acids 74-156 of HUMANK_P12 (SEQ ID NO:567), wherein said first amino acid sequence and second amino acid sequence are contiguous and in a sequential order.

[1779] 2. An isolated polypeptide encoding for a head of HUMANK_P12 (SEQ ID NO:567) comprising a polypeptide being at least 70%, optionally at least about 80%, preferably at least about 85%, more preferably at least about 90% and most preferably at least about 95% homologous to the sequence MWTFVTQLLVTLVLLSFFLVSCQNVMHIVRGSLCFVLKHIHQELDKELGESEGLSDDEE TISTRVVRRRVFLK (SEQ ID NO:1510) of HUMANK_P12 (SEQ ID NO:567).

[1780] It should be noted that the known protein sequence (ANK1_HUMAN (SEQ ID NO:628)) has one or more changes than the sequence given at the end of the application and named as being the amino acid sequence for ANK1_HUMAN_V1 (SEQ ID NO:629). These changes were previously known to occur and are listed in the table below.

[1781] Comparison report between HUMANK_P12 (SEQ ID NO:567) and Q8N604 (SEQ ID NO: 630):

[1782] 1. An isolated chimeric polypeptide encoding for HUMANK_P12 (SEQ ID NO:567) comprising a first amino acid sequence being at least 90% homologous to MWTFVTQLLVTLVLLSFFLVSCQNVMHIVRGSLCFVLKHIHQELDKELGESE corresponding to amino acids 1-52 of Q8N604 (SEQ ID NO:630), which also corresponds to amino acids 1-52 of HUMANK_P12 (SEQ ID NO:567), a bridging amino acid G corresponding to amino acid 53 of HUMANK_P12 (SEQ ID NO:567), a second amino acid sequence being at least 90% homologous to LSDDEETISTRVVRRRVFLKGNEFQNIPGEQVTEEQFTDEQGNIVTKKIIRKVVRQIDLSS ADAAQEHEEV corresponding to amino acids 54-124 of Q8N604 (SEQ ID NO:630), which also corresponds to amino acids 54-124 of HUMANK_P12 (SEQ ID NO:567), and a third amino acid sequence being at least 70%, optionally at least 80%, preferably at least 85%, more preferably at least 90% and most preferably at least 95% homologous to a polypeptide having the sequence TVEGPLEDPSELEVDIDYFMKHSKDHTSTPNP corresponding to amino acids 125-156 of HUMANK_P12 (SEQ ID NO:567), wherein said first amino acid sequence, bridging amino acid, second amino acid sequence and third amino acid sequence are contiguous and in a sequential order.

[1783] 2. An isolated polypeptide encoding for a tail of HUMANK_P12 (SEQ ID NO:567) comprising a polypeptide being at least 70%, optionally at least about 80%, preferably at least about 85%, more preferably at least about 90% and most preferably at least about 95% homologous to the sequence TVEGPLEDPSELEVDIDYFMKHSKDHTSTPNP in HUMANK_P12 (SEQ ID NO:567).

[1784] The location of the variant protein was determined according to results from a number of different software programs and analyses, including analyses from SignalP and other specialized programs. The variant protein is believed to be located as follows with regard to the cell: secreted. The protein localization is believed to be secreted because both signal-peptide prediction programs predict that this protein has a signal peptide, and neither trans-membrane region prediction program predicts that this protein has a trans-membrane region.

[1785] Variant protein HUMANK_P12 (SEQ ID NO:567) also has the following non-silent SNPs (Single Nucleotide Polymorphisms) as listed in Table 8, (given according to their position(s) on the amino acid sequence, with the alternative amino acid(s) listed; the last column indicates whether the SNP is known or not; the presence of known SNPs in variant protein HUMANK_P12 (SEQ ID NO:567) sequence provides support for the deduced sequence of this variant protein according to the present invention).

[1786] Variant protein HUMANK_P12 (SEQ ID NO:567) is encoded by the following transcript(s): HUMANK_T13 (SEQ ID NO:37), for which the sequence(s) is/are given at the end of the application. The coding portion of transcript HUMANK_T13 (SEQ ID NO:37) is shown in bold; this coding portion starts at position 2053 and ends at position 2520. The transcript also has the following SNPs as listed in Table 9 (given according to their position on the nucleotide sequence, with the alternative nucleic acid listed; the last column indicates whether the SNP is known or not; the presence of known SNPs in variant protein HUMANK_P12 (SEQ ID NO:567) sequence provides support for the deduced sequence of this variant protein according to the present invention).

[1787] Variant protein HUMANK_P21 (SEQ ID NO:568) according to the present invention has an amino acid sequence as given at the end of the application; it is encoded by transcript(s) HUMANK_T26 (SEQ ID NO:40). An alignment is given to the known protein (Ankyrin 1 (SEQ ID NO:628)) at the end of the application. One or more alignments to one or more previously published protein sequences are given at the end of the application. A brief description of the relationship of the variant protein according to the present invention to each such aligned protein is as follows:

[1788] Comparison report between HUMANK_P21 (SEQ ID NO:568) and AAH07930 (SEQ ID NO: 631):

[1789] 1. An isolated chimeric polypeptide encoding for HUMANK_P21 (SEQ ID NO:568) comprising a first amino acid sequence being at least 90% homologous to MWTFVTQLLVTLVLLSFFLVSCQNVMHIVRGSLCFVLKHIHQELDKELGESEGLSDDEE TISTRVVRRRVFLKGNEFQNIPGEQVTEEQFTDEQGNIVTKKIIRKVVRQIDLSSADAAQ EHEE corresponding to amino acids 1-123 of AAH07930 (SEQ ID NO:631), which also corresponds to amino acids 1-123 of HUMANK_P21 (SEQ ID NO:568), and a second amino acid sequence being at least 70%, optionally at least 80%, preferably at least 85%, more preferably at least 90% and most preferably at least 95% homologous to a polypeptide having the sequence VTVEGPLEDPSELEVELRGSGLQPDLIEGRKGAQIVKRASLKRGKQ (SEQ ID NO:1511) corresponding to amino acids 124-169 of HUMANK_P21 (SEQ ID NO:568), wherein said first amino acid sequence and second amino acid sequence are contiguous and in a sequential order.

[1790] 2. An isolated polypeptide encoding for a tail of HUMANK_P21 (SEQ ID NO:568) comprising a polypeptide being at least 70%, optionally at least about 80%, preferably at least about 85%, more preferably at least about 90% and most preferably at least about 95% homologous to the sequence

[1791] Comparison report between HUMANK_P21 (SEQ ID NO:568) and Q8N604 (SEQ ID NO:630):

[1792] 1. An isolated chimeric polypeptide encoding for HUMANK_P21 (SEQ ID NO:568) comprising a first amino acid sequence being at least 90% homologous to MWTFVTQLLVTLVLLSFFLVSCQNVMHIVRGSLCFVLKHIHQELDKELGESE corresponding to amino acids 1-52 of Q8N604 (SEQ ID NO:630), which also corresponds to amino acids 1-52 of HUMANK_P21 (SEQ ID NO:568), a bridging amino acid G corresponding to amino acid 53 of HUMANK_P21 (SEQ ID NO:568), a second amino acid sequence being at least 90% homologous to LSDDEETISTRVVRRRVFLKGNEFQNIPGEQVTEEQFTDEQGNIVTKKIIRKVVRQIDLSS ADAAQEHE corresponding to amino acids 54-122 of Q8N604 (SEQ ID NO:630), which also corresponds to amino acids 54-122 of HUMANK_P21 (SEQ ID NO:568), a third amino acid sequence being at least 70%, optionally at least 80%, preferably at least 85%, more preferably at least 90% and most preferably at least 95% homologous to a polypeptide having the sequence EVTVEGPLEDPSEL (SEQ ID NO:1512) corresponding to amino acids 123-136 of HUMANK_P21 (SEQ ID NO:568), and a fourth amino acid sequence being at least 90% homologous to EVELRGSGLQPDLIEGRKGAQIVKRASLKRGKQ corresponding to amino acids 123-155 of Q8N604 (SEQ ID NO:630), which also corresponds to amino acids 137-169 of HUMANK_P21 (SEQ ID NO:568), wherein said first amino acid sequence, bridging amino acid, second amino acid sequence, third amino acid sequence and fourth amino acid sequence are contiguous and in a sequential order.

[1793] 2. An isolated polypeptide encoding for an edge portion of HUMANK_P21 (SEQ ID NO:568), comprising an amino acid sequence being at least 70%, optionally at least about 80%, preferably at least about 85%, more preferably at least about 90% and most preferably at least about 95% homologous to the sequence encoding for EVTVEGPLEDPSEL (SEQ ID NO:1512), corresponding to HUMANK_P21 (SEQ ID NO:568).

[1794] The location of the variant protein was determined according to results from a number of different software programs and analyses, including analyses from SignalP and other specialized programs. The variant protein is believed to be located as follows with regard to the cell: secreted. The protein localization is believed to be secreted because both signal-peptide prediction programs predict that this protein has a signal peptide, and neither trans-membrane region prediction program predicts that this protein has a trans-membrane region.

[1795] Variant protein HUMANK_P21 (SEQ ID NO:568) also has the following non-silent SNPs (Single Nucleotide Polymorphisms) as listed in Table 10, (given according to their position(s) on the amino acid sequence, with the alternative amino acid(s) listed; the last column indicates whether the SNP is known or not; the presence of known SNPs in variant protein HUMANK_P21 (SEQ ID NO:568) sequence provides support for the deduced sequence of this variant protein according to the present invention).

[1796] Variant protein HUMANK_P21 (SEQ ID NO:568) is encoded by the following transcript(s): HUMANK_T26 (SEQ ID NO:40), for which the sequence(s) is/are given at the end of the application. The coding portion of transcript HUMANK_T26 (SEQ ID NO:40) is shown in bold; this coding portion starts at position 2053 and ends at position 2559. The transcript also has the following SNPs as listed in Table 11 (given according to their position on the nucleotide sequence, with the alternative nucleic acid listed; the last column indicates whether the SNP is known or not; the presence of known SNPs in variant protein HUMANK_P21 (SEQ ID NO:568) sequence provides support for the deduced sequence of this variant protein according to the present invention).

[1797] Variant protein HUMANK_P22 (SEQ ID NO:569) according to the present invention has an amino acid sequence as given at the end of the application; it is encoded by transcript(s) HUMANK_T27 (SEQ ID NO:41). An alignment is given to the known protein (Ankyrin 1 (SEQ ID NO:628)) at the end of the application. One or more alignments to one or more previously published protein sequences are given at the end of the application. A brief description of the relationship of the variant protein according to the present invention to each such aligned protein is as follows:

[1798] Comparison report between HUMANK_P22 (SEQ ID NO:569) and AAH07930 (SEQ ID NO:631):

[1799] 1. An isolated chimeric polypeptide encoding for HUMANK_P22 (SEQ ID NO:569) comprising a first amino acid sequence being at least 90% homologous to MWTFVTQLLVTLVLLSFFLVSCQNVMHIVRGSLCFVLKHIHQELDKELGESEGLSDDEE TISTRVVRRRVFLKGNEFQNIPGEQVTEEQFTDEQGNIVTKKIIRKVVRQIDLSSADAAQ EHEE corresponding to amino acids 1-123 of AAH07930 (SEQ ID NO:631), which also corresponds to amino acids 1-123 of HUMANK_P22 (SEQ ID NO:569), and a second amino acid sequence being at least 70%, optionally at least 80%, preferably at least 85%, more preferably at least 90% and most preferably at least 95% homologous to a polypeptide having the sequence VTVEGPLEDPSELEVDIDYFMKHSKVELRGSGLQPDLIEGRKGAQIVKRASLKRGKQ (SEQ ID NO:1513) corresponding to amino acids 124-180 of HUMANK_P22 (SEQ ID NO:569), wherein said first amino acid sequence and second amino acid sequence are contiguous and in a sequential order.

[1800] 2. An isolated polypeptide encoding for a tail of HUMANK_P22 (SEQ ID NO:569) comprising a polypeptide being at least 70%, optionally at least about 80%, preferably at least about 85%, more preferably at least about 90% and most preferably at least about 95% homologous to the sequence VTVEGPLEDPSELEVDIDYFMKHSKVELRGSGLQPDLIEGRKGAQIVKRASLKRGKQ (SEQ ID NO:1513) in HUMANK_P22 (SEQ ID NO:569).

[1801] Comparison report between HUMANK_P22 (SEQ ID NO:569) and Q8N604 (SEQ ID NO:630):

[1802] 1. An isolated chimeric polypeptide encoding for HUMANK_P22 (SEQ ID NO:569) comprising a first amino acid sequence being at least 90% homologous to MWTFVTQLLVTLVLLSFFLVSCQNVMHIVRGSLCFVLKHIHQELDKELGESE corresponding to amino acids 1-52 of Q8N604 (SEQ ID NO:630), which also corresponds to amino acids 1-52 of HUMANK_P22 (SEQ ID NO:569), a bridging amino acid G corresponding to amino acid 53 of HUMANK_P22 (SEQ ID NO:569), a second amino acid sequence being at least 90% homologous to LSDDEETISTRVVRRRVFLKGNEFQNIPGEQVTEEQFTDEQGNIVTKKIIRKVVRQIDLSS ADAAQEHEE corresponding to amino acids 54-123 of Q8N604 (SEQ ID NO:630), which also corresponds to amino acids 54-123 of HUMANK_P22 (SEQ ID NO:569), a third amino acid sequence being at least 70%, optionally at least 80%, preferably at least 85%, more preferably at least 90% and most preferably at least 95% homologous to a polypeptide having the sequence VTVEGPLEDPSELEVDIDYFMKHSK (SEQ ID NO:1514) corresponding to amino acids 124-148 of HUMANK_P22 (SEQ ID NO:569), and a fourth amino acid sequence being at least 90% homologous to VELRGSGLQPDLIEGRKGAQIVKRASLKRGKQ (SEQ ID NO:1517) corresponding to amino acids 124-155 of Q8N604 (SEQ ID NO:630), which also corresponds to amino acids 149-180 of HUMANK_P22 (SEQ ID NO:569), wherein said first amino acid sequence, bridging amino acid, second amino acid sequence, third amino acid sequence and fourth amino acid sequence are contiguous and in a sequential order.

[1803] 2. An isolated polypeptide encoding for an edge portion of HUMANK_P22 (SEQ ID NO:569), comprising an amino acid sequence being at least 70%, optionally at least about 80%, preferably at least about 85%, more preferably at least about 90% and most preferably at least about 95% homologous to the sequence encoding for VTVEGPLEDPSELEVDIDYFMKHSK (SEQ ID NO:1514), corresponding to HUMANK_P22 (SEQ ID NO:569).

[1804] The location of the variant protein was determined according to results from a number of different software programs and analyses, including analyses from SignalP and other specialized programs. The variant protein is believed to be located as follows with regard to the cell: secreted. The protein localization is believed to be secreted because both signal-peptide prediction programs predict that this protein has a signal peptide, and neither trans-membrane region prediction program predicts that this protein has a trans-membrane region.

[1805] Variant protein HUMANK_P22 (SEQ ID NO:569) also has the following non-silent SNPs (Single Nucleotide Polymorphisms) as listed in Table 12, (given according to their position(s) on the amino acid sequence, with the alternative amino acid(s) listed; the last column indicates whether the SNP is known or not; the presence of known SNPs in variant protein HUMANK_P22 (SEQ ID NO:569) sequence provides support for the deduced sequence of this variant protein according to the present invention).

[1806] Variant protein HUMANK_P22 (SEQ ID NO:569) is encoded by the following transcript(s): HUMANK_T27 (SEQ ID NO:41), for which the sequence(s) is/are given at the end of the application. The coding portion of transcript HUMANK_T27 (SEQ ID NO:41) is shown in bold; this coding portion starts at position 2053 and ends at position 2592. The transcript also has the following SNPs as listed in Table 13 (given according to their position on the nucleotide sequence, with the alternative nucleic acid listed; the last column indicates whether the SNP is known or not; the presence of known SNPs in variant protein HUMANK_P22 (SEQ ID NO:569) sequence provides support for the deduced sequence of this variant protein according to the present invention).

[1807] Variant protein HUMANK_P23 (SEQ ID NO:570) according to the present invention has an amino acid sequence as given at the end of the application; it is encoded by transcript(s) HUMANK_T28 (SEQ ID NO:42). An alignment is given to the known protein (Ankyrin 1 (SEQ ID NO:628)) at the end of the application. One or more alignments to one or more previously published protein sequences are given at the end of the application. A brief description of the relationship of the variant protein according to the present invention to each such aligned protein is as follows:

[1808] Comparison report between HUMANK_P23 (SEQ ID NO:570) and AAH07930 (SEQ ID NO:631):

[1809] 1. An isolated chimeric polypeptide encoding for HUMANK_P23 (SEQ ID NO:570) comprising a first amino acid sequence being at least 90% homologous to MWTFVTQLLVTLVLLSFFLVSCQNVMHIVRGSLCFVLKHIHQELDKELGESEGLSDDEE TISTRVVRRRVFLKGNEFQNIPGEQVTEEQFTDEQGNIVTKKIIRKVVRQIDLSSADAAQ EHEE corresponding to amino acids 1-123 of AAH07930 (SEQ ID NO:631), which also corresponds to amino acids 1-123 of HUMANK_P23 (SEQ ID NO:570), and a second amino acid sequence being at least 70%, optionally at least 80%, preferably at least 85%, more preferably at least 90% and most preferably at least 95% homologous to a polypeptide having the sequence VTVEGPLEDPSELEDHTSTPNP (SEQ ID NO:1515) corresponding to amino acids 124-145 of HUMANK_P23 (SEQ ID NO:570), wherein said first amino acid sequence and second amino acid sequence are contiguous and in a sequential order.

[1810] 2. An isolated polypeptide encoding for a tail of HUMANK_P23 (SEQ ID NO:570) comprising a polypeptide being at least 70%, optionally at least about 80%, preferably at least about 85%, more preferably at least about 90% and most preferably at least about 95% homologous to the sequence VTVEGPLEDPSELEDHTSTPNP (SEQ ID NO:1515) in HUMANK_P23 (SEQ ID NO:570).

[1811] Comparison report between HUMANK_P23 (SEQ ID NO:570) and Q8N604 (SEQ ID NO:630):

[1812] 1. An isolated chimeric polypeptide encoding for HUMANK_P23 (SEQ ID NO:570) comprising a first amino acid sequence being at least 90% homologous to MWTFVTQLLVTLVLLSFFLVSCQNVMHIVRGSLCFVLKHIHQELDKELGESE corresponding to amino acids 1-52 of Q8N604 (SEQ ID NO:630), which also corresponds to amino acids 1-52 of HUMANK_P23 (SEQ ID NO:570), a bridging amino acid G corresponding to amino acid 53 of HUMANK_P23 (SEQ ID NO:570), a second amino acid sequence being at least 90% homologous to LSDDEETISTRVVRRRVFLKGNEFQNIPGEQVTEEQFTDEQGNIVTKKIIRKVVRQIDLSS ADAAQEHEEV corresponding to amino acids 54-124 of Q8N604 (SEQ ID NO:630), which also corresponds to amino acids 54-124 of HUMANK_P23 (SEQ ID NO:570), and a third amino acid sequence being at least 70%, optionally at least 80%, preferably at least 85%, more preferably at least 90% and most preferably at least 95% homologous to a polypeptide having the sequence TVEGPLEDPSELEDHTSTPNP corresponding to amino acids 125-145 of HUMANK_P23 (SEQ ID NO:570), wherein said first amino acid sequence, bridging amino acid, second amino acid sequence and third amino acid sequence are contiguous and in a sequential order.

[1813] 2. An isolated polypeptide encoding for a tail of HUMANK_P23 (SEQ ID NO:570) comprising a polypeptide being at least 70%, optionally at least about 80%, preferably at least about 85%, more preferably at least about 90% and most preferably at least about 95% homologous to the sequence TVEGPLEDPSELEDHTSTPNP in HUMANK_P23 (SEQ ID NO:570).

[1814] The location of the variant protein was determined according to results from a number of different software programs and analyses, including analyses from SignalP and other specialized programs. The variant protein is believed to be located as follows with regard to the cell: secreted. The protein localization is believed to be secreted because both signal-peptide prediction programs predict that this protein has a signal peptide, and neither trans-membrane region prediction program predicts that this protein has a trans-membrane region.

[1815] Variant protein HUMANK_P23 (SEQ ID NO:570) also has the following non-silent SNPs (Single Nucleotide Polymorphisms) as listed in Table 14, (given according to their position(s) on the amino acid sequence, with the alternative amino acid(s) listed; the last column indicates whether the SNP is known or not; the presence of known SNPs in variant protein HUMANK_P23 (SEQ ID NO:570) sequence provides support for the deduced sequence of this variant protein according to the present invention).

[1816] Variant protein HUMANK_P23 (SEQ ID NO:570) is encoded by the following transcript(s): HUMANK_T28 (SEQ ID NO:42), for which the sequence(s) is/are given at the end of the application. The coding portion of transcript HUMANK_T28 (SEQ ID NO:42) is shown in bold; this coding portion starts at position 2053 and ends at position 2487. The transcript also has the following SNPs as listed in Table 15 (given according to their position on the nucleotide sequence, with the alternative nucleic acid listed; the last column indicates whether the SNP is known or not; the presence of known SNPs in variant protein HUMANK_P23 (SEQ ID NO:570) sequence provides support for the deduced sequence of this variant protein according to the present invention).

[1817] Variant protein HUMANK_P27 (SEQ ID NO:571) according to the present invention has an amino acid sequence as given at the end of the application; it is encoded by transcript(s) HUMANK_T35 (SEQ ID NO:43). An alignment is given to the known protein (Ankyrin 1 (SEQ ID NO:628)) at the end of the application. One or more alignments to one or more previously published protein sequences are given at the end of the application. A brief description of the relationship of the variant protein according to the present invention to each such aligned protein is as follows:

[1818] Comparison report between HUMANK_P27 (SEQ ID NO:571) and AAH07930 (SEQ ID NO:631):

[1819] 1. An isolated chimeric polypeptide encoding for HUMANK_P27 (SEQ ID NO:571) comprising a first amino acid sequence being at least 90% homologous to MWTFVTQLLVTLVLLSFFLVSCQNVMHIVRGSLCFVLKHIHQELDKELGESEGLSDDEE TISTRVVRRRVFLKGNEFQNIPGEQVTEEQFTDEQGNIVTKK corresponding to amino acids 1-101 of AAH07930 (SEQ ID NO:631), which also corresponds to amino acids 1-101 of HUMANK_P27 (SEQ ID NO:571), and a second amino acid sequence being at least 70%, optionally at least 80%, preferably at least 85%, more preferably at least 90% and most preferably at least 95% homologous to a polypeptide having the sequence VGAECSPLCWGEAGGLEAKRW (SEQ ID NO:1516) corresponding to amino acids 102-122 of HUMANK_P27 (SEQ ID NO:571), wherein said first amino acid sequence and second amino acid sequence are contiguous and in a sequential order.

[1820] 2. An isolated polypeptide encoding for a tail of HUMANK_P27 (SEQ ID NO:571) comprising a polypeptide being at least 70%, optionally at least about 80%, preferably at least about 85%, more preferably at least about 90% and most preferably at least about 95% homologous to the sequence VGAECSPLCWGEAGGLEAKRW (SEQ ID NO:1516) in HUMANK_P27 (SEQ ID NO:571).

[1821] Comparison report between HUMANK_P27 (SEQ ID NO:571) and Q8N604 (SEQ ID NO:630):

[1822] 1. An isolated chimeric polypeptide encoding for HUMANK_P27 (SEQ ID NO:571) comprising a first amino acid sequence being at least 90% homologous to MWTFVTQLLVTLVLLSFFLVSCQNVMHIVRGSLCFVLKHIHQELDKELGESE corresponding to amino acids 1-52 of Q8N604 (SEQ ID NO:630), which also corresponds to amino acids 1-52 of HUMANK_P27 (SEQ ID NO:571), a bridging amino acid G corresponding to amino acid 53 of HUMANK_P27 (SEQ ID NO:571), a second amino acid sequence being at least 90% homologous to LSDDEETISTRVVRRRVFLKGNEFQNIPGEQVTEEQFTDEQGNIVTKK corresponding to amino acids 54-101 of Q8N604 (SEQ ID NO:630), which also corresponds to amino acids 54-101 of HUMANK_P27 (SEQ ID NO:571), and a third amino acid sequence being at least 70%, optionally at least 80%, preferably at least 85%, more preferably at least 90% and most preferably at least 95% homologous to a polypeptide having the sequence VGAECSPLCWGEAGGLEAKRW (SEQ ID NO:1516) corresponding to amino acids 102-122 of HUMANK_P27 (SEQ ID NO:571), wherein said first amino acid sequence, bridging amino acid, second amino acid sequence and third amino acid sequence are contiguous and in a sequential order.

[1823] 2. An isolated polypeptide encoding for a tail of HUMANK_P27 (SEQ ID NO:571) comprising a polypeptide being at least 70%, optionally at least about 80%, preferably at least about 85%, more preferably at least about 90% and most preferably at least about 95% homologous to the sequence VGAECSPLCWGEAGGLEAKRW (SEQ ID NO:1516) in HUMANK_P27 (SEQ ID NO:571).

[1824] The location of the variant protein was determined according to results from a number of different software programs and analyses, including analyses from SignalP and other specialized programs. The variant protein is believed to be located as follows with regard to the cell: secreted. The protein localization is believed to be secreted because both signal-peptide prediction programs predict that this protein has a signal peptide, and neither trans-membrane region prediction program predicts that this protein has a trans-membrane region.

[1825] Variant protein HUMANK_P27 (SEQ ID NO:571) also has the following non-silent SNPs (Single Nucleotide Polymorphisms) as listed in Table 16, (given according to their position(s) on the amino acid sequence, with the alternative amino acid(s) listed; the last column indicates whether the SNP is known or not; the presence of known SNPs in variant protein HUMANK_P27 (SEQ ID NO:571) sequence provides support for the deduced sequence of this variant protein according to the present invention).

[1826] Variant protein HUMANK_P27 (SEQ ID NO:571) is encoded by the following transcript(s): HUMANK_T35 (SEQ ID NO:43, for which the sequence(s) is/are given at the end of the application. The coding portion of transcript HUMANK_T35 (SEQ ID NO:43) is shown in bold; this coding portion starts at position 2053 and ends at position 2418. The transcript also has the following SNPs as listed in Table 17 (given according to their position on the nucleotide sequence, with the alternative nucleic acid listed; the last column indicates whether the SNP is known or not; the presence of known SNPs in variant protein HUMANK_P27 (SEQ ID NO:571) sequence provides support for the deduced sequence of this variant protein according to the present invention).

[1827] Variant protein HUMANK_P29 (SEQ ID NO:572) according to the present invention has an amino acid sequence as given at the end of the application; it is encoded by transcript(s) HUMANK_T3 (SEQ ID NO:36). An alignment is given to the known protein (Ankyrin 1 (SEQ ID NO:628)) at the end of the application. One or more alignments to one or more previously published protein sequences are given at the end of the application. A brief description of the relationship of the variant protein according to the present invention to each such aligned protein is as follows:

[1828] Comparison report between HUMANK_P29 (SEQ ID NO:572) and AAH07930 (SEQ ID NO:631):

[1829] 1. An isolated chimeric polypeptide encoding for HUMANK_P29 (SEQ ID NO:572) comprising a first amino acid sequence being at least 90% homologous to MWTFVTQLLVTLVLLSFFLVSCQNVMHIVRGSLCFVLKHIHQELDKELGESEGLSDDEE TIS corresponding to amino acids 1-62 of AAH07930 (SEQ ID NO:631), which also corresponds to amino acids 1-62 of HUMANK_P29 (SEQ ID NO:572), a bridging amino acid P corresponding to amino acid 63 of HUMANK_P29 (SEQ ID NO:572), a second amino acid sequence being at least 90% homologous to RVVRRRVFLKGNEFQNIPGEQVTEEQFTDEQGNIVTKKIIRKVVRQIDLSSADAAQEHEE corresponding to amino acids 64-123 of AAH07930 (SEQ ID NO:631), which also corresponds to amino acids 64-123 of HUMANK_P29 (SEQ ID NO:572), and a third amino acid sequence being at least 70%, optionally at least 80%, preferably at least 85%, more preferably at least 90% and most preferably at least 95% homologous to a polypeptide having the sequence VELRGSGLQPDLIEGRKGAQIVKRASLKRGKQ (SEQ ID NO:1517) corresponding to amino acids 124-155 of HUMANK_P29 (SEQ ID NO:572), wherein said first amino acid sequence, bridging amino acid, second amino acid sequence and third amino acid sequence are contiguous and in a sequential order.

[1830] 2. An isolated polypeptide encoding for a tail of HUMANK_P29 (SEQ ID NO:572) comprising a polypeptide being at least 70%, optionally at least about 80%, preferably at least about 85%, more preferably at least about 90% and most preferably at least about 95% homologous to the sequence VELRGSGLQPDLIEGRKGAQIVKRASLKRGKQ (SEQ ID NO:1517) in HUMANK_P29 (SEQ ID NO:572).

[1831] Comparison report between HUMANK_P29 (SEQ ID NO:572) and Q8N604 (SEQ ID NO:630):

[1832] 1. An isolated chimeric polypeptide encoding for HUMANK_P29 (SEQ ID NO:572) comprising a first amino acid sequence being at least 90% homologous to MWTFVTQLLVTLVLLSFFLVSCQNVMHIVRGSLCFVLKHIHQELDKELGESE corresponding to amino acids 1-52 of Q8N604 (SEQ ID NO:630), which also corresponds to amino acids 1-52 of HUMANK_P29 (SEQ ID NO:572), a bridging amino acid G corresponding to amino acid 53 of HUMANK_P29 (SEQ ID NO:572), a second amino acid sequence being at least 90% homologous to LSDDEETIS corresponding to amino acids 54-62 of Q8N604 (SEQ ID NO:630), which also corresponds to amino acids 54-62 of HUMANK_P29 (SEQ ID NO:572), a bridging amino acid P corresponding to amino acid 63 of HUMANK_P29 (SEQ ID NO:572), and a third amino acid sequence being at least 90% homologous to RVVRRRVFLKGNEFQNIPGEQVTEEQFTDEQGNIVTKKIIRKVVRQIDLSSADAAQEHEE VELRGSGLQPDLIEGRKGAQIVKRASLKRGKQ corresponding to amino acids 64-155 of Q8N604 (SEQ ID NO:630), which also corresponds to amino acids 64-155 of HUMANK_P29 (SEQ ID NO:572), wherein said first amino acid sequence, bridging amino acid, second amino acid sequence, bridging amino acid and third amino acid sequence are contiguous and in a sequential order.

[1833] The location of the variant protein was determined according to results from a number of different software programs and analyses, including analyses from SignalP and other specialized programs. The variant protein is believed to be located as follows with regard to the cell: secreted. The protein localization is believed to be secreted because both signal-peptide prediction programs predict that this protein has a signal peptide, and neither trans-membrane region prediction program predicts that this protein has a trans-membrane region.

[1834] Variant protein HUMANK_P29 (SEQ ID NO:572) also has the following non-silent SNPs (Single Nucleotide Polymorphisms) as listed in Table 18, (given according to their position(s) on the amino acid sequence, with the alternative amino acid(s) listed; the last column indicates whether the SNP is known or not; the presence of known SNPs in variant protein HUMANK_P29 (SEQ ID NO:572) sequence provides support for the deduced sequence of this variant protein according to the present invention).

[1835] Variant protein HUMANK_P29 (SEQ ID NO:572) is encoded by the following transcript(s): HUMANK_T3 (SEQ ID NO:36, for which the sequence(s) is/are given at the end of the application. The coding portion of transcript HUMANK_T3 (SEQ ID NO:36) is shown in bold; this coding portion starts at position 2053 and ends at position 2517. The transcript also has the following SNPs as listed in Table 19 (given according to their position on the nucleotide sequence, with the alternative nucleic acid listed; the last column indicates whether the SNP is known or not; the presence of known SNPs in variant protein HUMANK_P29 (SEQ ID NO:572) sequence provides support for the deduced sequence of this variant protein according to the present invention).

[1836] Variant protein HUMANK_P33 (SEQ ID NO:573) according to the present invention has an amino acid sequence as given at the end of the application; it is encoded by transcript(s) HUMANK_T23 (SEQ ID NO:38). An alignment is given to the known protein (Ankyrin 1 (SEQ ID NO:628)) at the end of the application. One or more alignments to one or more previously published protein sequences are given at the end of the application. A brief description of the relationship of the variant protein according to the present invention to each such aligned protein is as follows:

[1837] Comparison report between HUMANK_P33 (SEQ ID NO:573) and AAH07930 (SEQ ID NO:631):

[1838] 1. An isolated chimeric polypeptide encoding for HUMANK_P33 (SEQ ID NO:573) comprising a first amino acid sequence being at least 90% homologous to MWTFVTQLLVTLVLLSFFLVSCQNVMHIVRGSLCFVLKHIHQELDKELGESEGLSDDEE TIS corresponding to amino acids 1-62 of AAH07930 (SEQ ID NO:631), which also corresponds to amino acids 1-62 of HUMANK_P33 (SEQ ID NO:573), a bridging amino acid P corresponding to amino acid 63 of HUMANK_P33 (SEQ ID NO:573), a second amino acid sequence being at least 90% homologous to RVVRRRVFLKGNEFQNIPGEQVTEEQFTDEQGNIVTKK corresponding to amino acids 64-101 of AAH07930 (SEQ ID NO:631), which also corresponds to amino acids 64-101 of HUMANK_P33 (SEQ ID NO:573), and a third amino acid sequence being at least 70%, optionally at least 80%, preferably at least 85%, more preferably at least 90% and most preferably at least 95% homologous to a polypeptide having the sequence DHTSTPNP (SEQ ID NO:1518) corresponding to amino acids 102-109 of HUMANK_P33 (SEQ ID NO:573) wherein said first amino acid sequence, bridging amino acid, second amino acid sequence and third amino acid sequence are contiguous and in a sequential order.

[1839] 2. An isolated polypeptide encoding for a tail of HUMANK_P33 (SEQ ID NO:573) comprising a polypeptide being at least 70%, optionally at least about 80%, preferably at least about 85%, more preferably at least about 90% and most preferably at least about 95% homologous to the sequence DHTSTPNP (SEQ ID NO:1518) in HUMANK_P33 (SEQ ID NO:573).

[1840] Comparison report between HUMANK_P33 (SEQ ID NO:573) and Q8N604 (SEQ ID NO:630):

[1841] 1. An isolated chimeric polypeptide encoding for HUMANK_P33 (SEQ ID NO:573) comprising a first amino acid sequence being at least 90% homologous to MWTFVTQLLVTLVLLSFFLVSCQNVMHIVRGSLCFVLKHIHQELDKELGESE corresponding to amino acids 1-52 of Q8N604 (SEQ ID NO:630), which also corresponds to amino acids 1-52 of HUMANK_P33 (SEQ ID NO:573), a bridging amino acid G corresponding to amino acid 53 of HUMANK_P33 (SEQ ID NO:573), a second amino acid sequence being at least 90% homologous to LSDDEETIS corresponding to amino acids 54-62 of Q8N604 (SEQ ID NO:630), which also corresponds to amino acids 54-62 of HUMANK_P33 (SEQ ID NO:573), a bridging amino acid P corresponding to amino acid 63 of HUMANK_P33 (SEQ ID NO:573), a third amino acid sequence being at least 90% homologous to RVVRRRVFLKGNEFQNIPGEQVTEEQFTDEQGNIVTKK corresponding to amino acids 64-101 of Q8N604 (SEQ ID NO:630), which also corresponds to amino acids 64-101 of HUMANK_P33 (SEQ ID NO:573), and a fourth amino acid sequence being at least 70%, optionally at least 80%, preferably at least 85%, more preferably at least 90% and most preferably at least 95% homologous to a polypeptide having the sequence DHTSTPNP (SEQ ID NO:1518) corresponding to amino acids 102-109 of HUMANK_P33 (SEQ ID NO:573), wherein said first amino acid sequence, bridging amino acid, second amino acid sequence, bridging amino acid, third amino acid sequence and fourth amino acid sequence are contiguous and in a sequential order.

[1842] 2. An isolated polypeptide encoding for a tail of HUMANK_P33 (SEQ ID NO:573) comprising a polypeptide being at least 70%, optionally at least about 80%, preferably at least about 85%, more preferably at least about 90% and most preferably at least about 95% homologous to the sequence DHTSTPNP (SEQ ID NO:1518) in HUMANK_P33 (SEQ ID NO:573).

[1843] The location of the variant protein was determined according to results from a number of different software programs and analyses, including analyses from SignalP and other specialized programs. The variant protein is believed to be located as follows with regard to the cell: secreted. The protein localization is believed to be secreted because both signal-peptide prediction programs predict that this protein has a signal peptide, and neither trans-membrane region prediction program predicts that this protein has a trans-membrane region.

[1844] Variant protein HUMANK_P33 (SEQ ID NO:573) also has the following non-silent SNPs (Single Nucleotide Polymorphisms) as listed in Table 20, (given according to their position(s) on the amino acid sequence, with the alternative amino acid(s) listed; the last column indicates whether the SNP is known or not; the presence of known SNPs in variant protein HUMANK_P33 (SEQ ID NO:573) sequence provides support for the deduced sequence of this variant protein according to the present invention).

[1845] Variant protein HUMANK_P33 (SEQ ID NO:573) is encoded by the following transcript(s): HUMANK_T23 (SEQ ID NO:38), for which the sequence(s) is/are given at the end of the application. The coding portion of transcript HUMANK_T23 (SEQ ID NO:38) is shown in bold; this coding portion starts at position 2053 and ends at position 2379. The transcript also has the following SNPs as listed in Table 21 (given according to their position on the nucleotide sequence, with the alternative nucleic acid listed; the last column indicates whether the SNP is known or not; the presence of known SNPs in variant protein HUMANK_P33 (SEQ ID NO:573) sequence provides support for the deduced sequence of this variant protein according to the present invention).

[1846] Variant protein HUMANK_P34 (SEQ ID NO:574) according to the present invention has an amino acid sequence as given at the end of the application; it is encoded by transcript(s) HUMANK_T24 (SEQ ID NO:39). An alignment is given to the known protein (Ankyrin 1 (SEQ ID NO:628)) at the end of the application. One or more alignments to one or more previously published protein sequences are given at the end of the application. A brief description of the relationship of the variant protein according to the present invention to each such aligned protein is as follows:

[1847] Comparison report between HUMANK_P34 (SEQ ID NO:574) and AAH07930 (SEQ ID NO:631):

[1848] 1. An isolated chimeric polypeptide encoding for HUMANK_P34 (SEQ ID NO:574) comprising a first amino acid sequence being at least 90% homologous to MWTFVTQLLVTLVLLSFFLVSCQNVMHIVRGSLCFVLKHIHQELDKELGESEGLSDDEE TIS corresponding to amino acids 1-62 of AAH07930 (SEQ ID NO:631), which also corresponds to amino acids 1-62 of HUMANK_P34 (SEQ ID NO:574), a bridging amino acid P corresponding to amino acid 63 of HUMANK_P34 (SEQ ID NO:574), a second amino acid sequence being at least 90% homologous to RVVRRRVFLKGNEFQNIPGEQVTEEQFTDEQGNIVTKK corresponding to amino acids 64-101 of AAH07930 (SEQ ID NO:631), which also corresponds to amino acids 64-101 of HUMANK_P34 (SEQ ID NO:574), and a third amino acid sequence being at least 70%, optionally at least 80%, preferably at least 85%, more preferably at least 90% and most preferably at least 95% homologous to a polypeptide having the sequence VELRGSGLQPDLIEGRKGAQIVKRASLKRGKQ (SEQ ID NO:1517) corresponding to amino acids 102-133 of HUMANK_P34 (SEQ ID NO:574), wherein said first amino acid sequence, bridging amino acid, second amino acid sequence and third amino acid sequence are contiguous and in a sequential order.

[1849] 2. An isolated polypeptide encoding for a tail of HUMANK_P34 (SEQ ID NO:574) comprising a polypeptide being at least 70%, optionally at least about 80%, preferably at least about 85%, more preferably at least about 90% and most preferably at least about 95% homologous to the sequence VELRGSGLQPDLIEGRKGAQIVKRASLKRGKQ (SEQ ID NO:1517) in HUMANK_P34 (SEQ ID NO:574).

[1850] Comparison report between HUMANK_P34 (SEQ ID NO:574) and Q8N604 (SEQ ID NO:630):

[1851] 1. An isolated chimeric polypeptide encoding for HUMANK_P34 (SEQ ID NO:574) comprising a first amino acid sequence being at least 90% homologous to MWTFVTQLLVTLVLLSFFLVSCQNVMHIVRGSLCFVLKHIHQELDKELGESE corresponding to amino acids 1-52 of Q8N604 (SEQ ID NO:630), which also corresponds to amino acids 1-52 of HUMANK_P34 (SEQ ID NO:574), a bridging amino acid G corresponding to amino acid 53 of HUMANK_P34 (SEQ ID NO:574), a second amino acid sequence being at least 90% homologous to LSDDEETIS corresponding to amino acids 54-62 of Q8N604 (SEQ ID NO:630), which also corresponds to amino acids 54-62 of HUMANK_P34 (SEQ ID NO:574), a bridging amino acid P corresponding to amino acid 63 of HUMANK_P34 (SEQ ID NO:574), a third amino acid sequence being at least 90% homologous to RVVRRRVFLKGNEFQNIPGEQVTEEQFTDEQGNIVTKK corresponding to amino acids 64-101 of Q8N604 (SEQ ID NO:630), which also corresponds to amino acids 64-101 of HUMANK_P34 (SEQ ID NO:574), and a fourth amino acid sequence being at least 90% homologous to VELRGSGLQPDLIEGRKGAQIVKRASLKRGKQ (SEQ ID NO:1517) corresponding to amino acids 124-155 of Q8N604 (SEQ ID NO:630), which also corresponds to amino acids 102-133 of HUMANK_P34 (SEQ ID NO:574), wherein said first amino acid sequence, bridging amino acid, second amino acid sequence, bridging amino acid, third amino acid sequence and fourth amino acid sequence are contiguous and in a sequential order.

[1852] 2. An isolated chimeric polypeptide encoding for an edge portion of HUMANK_P34 (SEQ ID NO:574), comprising a polypeptide having a length “n”, wherein n is at least about 10 amino acids in length, optionally at least about 20 amino acids in length, preferably at least about 30 amino acids in length, more preferably at least about 40 amino acids in length and most preferably at least about 50 amino acids in length, wherein at least two amino acids comprise KV, having a structure as follows: a sequence starting from any of amino acid numbers 101−x to 101; and ending at any of amino acid numbers 102+((n−2)−x), in which x varies from 0 to n−2.

[1853] The location of the variant protein was determined according to results from a number of different software programs and analyses, including analyses from SignalP and other specialized programs. The variant protein is believed to be located as follows with regard to the cell: secreted. The protein localization is believed to be secreted because both signal-peptide prediction programs predict that this protein has a signal peptide, and neither trans-membrane region prediction program predicts that this protein has a trans-membrane region.

[1854] Variant protein HUMANK_P34 (SEQ ID NO:574) also has the following non-silent SNPs (Single Nucleotide Polymorphisms) as listed in Table 22, (given according to their position(s) on the amino acid sequence, with the alternative amino acid(s) listed; the last column indicates whether the SNP is known or not; the presence of known SNPs in variant protein HUMANK_P34 (SEQ ID NO:574) sequence provides support for the deduced sequence of this variant protein according to the present invention).

[1855] Variant protein HUMANK_P34 (SEQ ID NO:574) is encoded by the following transcript(s): HUMANK_T24 (SEQ ID NO:39), for which the sequence(s) is/are given at the end of the application. The coding portion of transcript HUMANK_T24 (SEQ ID NO:39) is shown in bold; this coding portion starts at position 2053 and ends at position 2451. The transcript also has the following SNPs as listed in Table 23 (given according to their position on the nucleotide sequence, with the alternative nucleic acid listed; the last column indicates whether the SNP is known or not; the presence of known SNPs in variant protein HUMANK_P34 (SEQ ID NO:574) sequence provides support for the deduced sequence of this variant protein according to the present invention).

[1856] As noted above, cluster HUMANK features 22 segment(s), which were listed in Table 2 above and for which the sequence(s) are given at the end of the application. These segment(s) are portions of nucleic acid sequence(s) which are described herein separately because they are of particular interest. A description of each segment according to the present invention is now provided.

[1857] Segment cluster HUMANK_node_{—}91 (SEQ ID NO:285) according to the present invention is supported by 8 libraries. The number of libraries was determined as previously described. This segment can be found in the following transcript(s): HUMANK_T3 (SEQ ID NO:36), HUMANK_T13 (SEQ ID NO:37), HUMANK_T23 (SEQ ID NO:38), HUMANK_T24 (SEQ ID NO:39, HUMANK_T26 (SEQ ID NO:40), HUMANK_T27 (SEQ ID NO:41, HUMANK_T28 (SEQ ID NO:42) and HUMANK_T35 (SEQ ID NO:43). Table 24 below describes the starting and ending position of this segment on each transcript.

[1858] Segment cluster HUMANK_node_{—}92 (SEQ ID NO:286) according to the present invention is supported by 19 libraries. The number of libraries was determined as previously described. This segment can be found in the following transcript(s): HUMANK_T3 (SEQ ID NO:36), HUMANK_T13 (SEQ ID NO:37), HUMANK_T23 (SEQ ID NO:38), HUMANK_T24 (SEQ ID NO:39), HUMANK_T26 (SEQ ID NO:40), HUMANK_T27 (SEQ ID NO:41, HUMANK_T28 (SEQ ID NO:42) and HUMANK_T35 (SEQ ID NO:43). Table 25 below describes the starting and ending position of this segment on each transcript.

[1859] Segment cluster HUMANK_node_{—}93 (SEQ ID NO:287) according to the present invention is supported by 31 libraries. The number of libraries was determined as previously described. This segment can be found in the following transcript(s): HUMANK_T3 (SEQ ID NO:36), HUMANK_T13 (SEQ ID NO:37), HUMANK_T23 (SEQ ID NO:38) HUMANK_T24 (SEQ ID NO:39, HUMANK_T26 (SEQ ID NO:40), HUMANK_T27 (SEQ ID NO:41), HUMANK_T28 (SEQ ID NO:42) and HUMANK_T35 (SEQ ID NO:43). Table 26 below describes the starting and ending position of this segment on each transcript.

[1860] Segment cluster HUMANK_node_{—}100 (SEQ ID NO:288) according to the present invention is supported by 1 libraries. The number of libraries was determined as previously described. This segment can be found in the following transcript(s): HUMANK_T35 (SEQ ID NO:43). Table 27 below describes the starting and ending position of this segment on each transcript.

[1861] Segment cluster HUMANK_node_{—}108 (SEQ ID NO:289) according to the present invention is supported by 33 libraries. The number of libraries was determined as previously described. This segment can be found in the following transcript(s): HUMANK_T3 (SEQ ID NO:36), HUMANK_T24 (SEQ ID NO:39), HUMANK_T26 (SEQ ID NO:40) and HUMANK_T27 (SEQ ID NO:41). Table 28 below describes the starting and ending position of this segment on each transcript.

[1862] Segment cluster HUMANK_node_{—}113 (SEQ ID NO:290) according to the present invention is supported by 56 libraries. The number of libraries was determined as previously described. This segment can be found in the following transcript(s): HUMANK_T3 (SEQ ID NO:36), HUMANK_T13 (SEQ ID NO:37), HUMANK_T23 (SEQ ID NO:38), HUMANK_T24 (SEQ ID NO:39), HUMANK_T26 (SEQ ID NO:40, HUMANK_T27 (SEQ ID NO:41) and HUMANK_T28 (SEQ ID NO:42). Table 29 below describes the starting and ending position of this segment on each transcript.

[1863] Segment cluster HUMANK_node_{—}115 (SEQ ID NO:291) according to the present invention is supported by 63 libraries. The number of libraries was determined as previously described. This segment can be found in the following transcript(s): HUMANK_T3 (SEQ ID NO:36), HUMANK_T13 (SEQ ID NO:37), HUMANK_T23 (SEQ ID NO:38), HUMANK_T24 (SEQ ID NO:39, HUMANK_T26 (SEQ ID NO:40, HUMANK_T27 (SEQ ID NO:41) and HUMANK_T28 (SEQ ID NO:42). Table 30 below describes the starting and ending position of this segment on each transcript.

[1864] Segment cluster HUMANK_node_{—}117 (SEQ ID NO:292) according to the present invention is supported by 28 libraries. The number of libraries was determined as previously described. This segment can be found in the following transcript(s): HUMANK_T3 (SEQ ID NO:36), HUMANK_T13 (SEQ ID NO:37), HUMANK_T23 (SEQ ID NO:38), HUMANK_T24 (SEQ ID NO:39), HUMANK_T26 (SEQ ID NO:40), HUMANK_T27 (SEQ ID NO:41) and HUMANK_T28 (SEQ ID NO:42). Table 31 below describes the starting and ending position of this segment on each transcript.

[1865] Segment cluster HUMANK_node_{—}119 (SEQ ID NO:293) according to the present invention is supported by 10 libraries. The number of libraries was determined as previously described. This segment can be found in the following transcript(s): HUMANK_T3 (SEQ ID NO:36), HUMANK_T13 (SEQ ID NO:37), HUMANK_T23 (SEQ ID NO:38) HUMANK_T24 (SEQ ID NO:39), HUMANK_T26 (SEQ ID NO:40, HUMANK_T27 (SEQ ID NO:41) and HUMANK_T28 (SEQ ID NO:42). Table 32 below describes the starting and ending position of this segment on each transcript.

[1866] Segment cluster HUMCA1XIA_node_{—}70 (SEQ ID NO:352) according to the present invention is supported by 6 libraries. The number of libraries was determined as previously described. This segment can be found in the following transcript(s): HUMCA1XIA_T16 (SEQ ID NO:45). Table 57 below describes the starting and ending position of this segment on each transcript.

[1867] Segment cluster HUMCA1XIA_node_{—}72 (SEQ ID NO:353) according to the present invention is supported by 6 libraries. The number of libraries was determined as previously described. This segment can be found in the following transcript(s): HUMCA1XIA_T16 (SEQ ID NO:45). Table 58 below describes the starting and ending position of this segment on each transcript.

[1868] Segment cluster HUMCA1XIA_node_{—}74 (SEQ ID NO:354) according to the present invention is supported by 5 libraries. The number of libraries was determined as previously described. This segment can be found in the following transcript(s): HUMCA1XIA_T16 (SEQ ID NO:45). Table 59 below describes the starting and ending position of this segment on each transcript.

[1869] Segment cluster HUMCA1XIA_node_{—}76 (SEQ ID NO:355) according to the present invention is supported by 6 libraries. The number of libraries was determined as previously described. This segment can be found in the following transcript(s): HUMCA1XIA_T16 (SEQ ID NO:45). Table 60 below describes the starting and ending position of this segment on each transcript.

[1870] Segment cluster HUMCA1XIA_node_{—}78 (SEQ ID NO:356) according to the present invention is supported by 6 libraries. The number of libraries was determined as previously described. This segment can be found in the following transcript(s): HUMCA1XIA_T16 (SEQ ID NO:45). Table 61 below describes the starting and ending position of this segment on each transcript.

[1871] Segment cluster HUMCA1XIA_node_{—}81 (SEQ ID NO:357) according to the present invention is supported by 8 libraries. The number of libraries was determined as previously described. This segment can be found in the following transcript(s): HUMCA1XIA_T16 (SEQ ID NO:45). Table 62 below describes the starting and ending position of this segment on each transcript.

[1872] Segment cluster HUMCA1XIA_node_{—}83 (SEQ ID NO:358) according to the present invention is supported by 7 libraries. The number of libraries was determined as previously described. This segment can be found in the following transcript(s): HUMCA1XIA_T16 (SEQ ID NO:45). Table 63 below describes the starting and ending position of this segment on each transcript.

[1873] Segment cluster HUMCA1XIA_node_{—}85 (SEQ ID NO:359) according to the present invention is supported by 6 libraries. The number of libraries was determined as previously described. This segment can be found in the following transcript(s): HUMCA1XIA_T16 (SEQ ID NO:45). Table 64 below describes the starting and ending position of this segment on each transcript.

[1874] Segment cluster HUMCA1XIA_node_{—}87 (SEQ ID NO:360) according to the present invention is supported by 10 libraries. The number of libraries was determined as previously described. This segment can be found in the following transcript(s): HUMCA1XIA_T16 (SEQ ID NO:45). Table 65 below describes the starting and ending position of this segment on each transcript.

[1875] Segment cluster HUMCA1XIA_node_{—}89 (SEQ ID NO:361) according to the present invention is supported by 9 libraries. The number of libraries was determined as previously described. This segment can be found in the following transcript(s): HUMCA1XIA_T16 (SEQ ID NO:45). Table 66 below describes the starting and ending position of this segment on each transcript.

[1876] Segment cluster HUMCA1XIA_node_{—}91 (SEQ ID NO:362) according to the present invention is supported by 11 libraries. The number of libraries was determined as previously described. This segment can be found in the following transcript(s): HUMCA1XIA_T16 (SEQ ID NO:45). Table 67 below describes the starting and ending position of this segment on each transcript.

Variant protein alignment to the previously known protein:

Sequence name: CA1B_HUMAN_V5(SEQ ID NO:634)

Sequence Documentation:

Alignment of: HUMCA1XIA_P14 (SEQ ID NO:576)×CA1B_HUMAN_V5 (SEQ ID NO:634) ••

Alignment segment 1/1:

Alignment:

Sequence name: CA1B_HUMAN (SEQ ID NO:633)

Sequence Documentation:

Alignment of: HUMCA1XIA_P15 (SEQ ID NO:577)×CA1B_HUMAN (SEQ ID NO:633) ••

Alignment segment 1/1:

Alignment:

Sequence name: CA1B_HUMAN (SEQ ID NO:633)

Sequence Documentation:

Alignment of: HUMCA1XIA_P16 (SEQ ID NO:578)×CA1B_HUMAN (SEQ ID NO:633) ••

Alignment segment 1/1:

Alignment:

Sequence name: CA1B_HUMAN (SEQ ID NO:633)

Sequence Documentation:

Alignment of: HUMCA1XIA_P17 (SEQ ID NO:579)×CA1B_HUMAN (SEQ ID NO:633) ••

Alignment segment 1/1:

Alignment:

Description for Cluster HSS100PCB

[1877] Cluster HSS100PCB features 1 transcript(s) and 3 segment(s) of interest, the names for which are given in Tables 1 and 2, respectively, the sequences themselves are given at the end of the application. The selected protein variants are given in table 3.

[1878] These sequences are variants of the known protein S-100P protein (SwissProt accession identifier S10P_HUMAN), SEQ ID NO: 635, referred to herein as the previously known protein.

[1879] The sequence for protein S-100P protein (SEQ ID NO:635) is given at the end of the application, as “S-100P protein amino acid sequence”. Known polymorphisms for this sequence are as shown in Table 4.

[1880] The following GO Annotation(s) apply to the previously known protein. The following annotation(s) were found: calcium binding; protein binding, which are annotation(s) related to Molecular Function.

[1881] The GO assignment relies on information from one or more of the SwissProt/TremB1 Protein knowledgebase, available from <http://www.expasy.ch/sprot/>; or Locuslink, available from <http://www.ncbi.nlm.nih.gov/projects/LocusLink/>.

[1882] Cluster HSS100PCB can be used as a diagnostic marker according to overexpression of transcripts of this cluster in cancer. Expression of such transcripts in normal tissues is also given according to the previously described methods. The term “number” in the left hand column of the table and the numbers on the y-axis of the figure below refer to weighted expression of ESTs in each category, as “parts per million” (ratio of the expression of ESTs for a particular cluster to the expression of all ESTs in that category, according to parts per million).

[1883] Overall, the following results were obtained as shown with regard to the histograms in FIG. 25 and Table 5. This cluster is overexpressed (at least at a minimum level) in the following pathological conditions: a mixture of malignant tumors from different tissues.

[1884] As noted above, cluster HSS100PCB features 1 transcript(s), which were listed in Table 1 above. These transcript(s) encode for protein(s) which are variant(s) of protein S-100P protein (SEQ ID NO:635). A description of each variant protein according to the present invention is now provided.

[1885] Variant protein HSS100PCB_P3 (SEQ ID NO:580) according to the present invention has an amino acid sequence as given at the end of the application; it is encoded by transcript(s) HSS100PCB_T1 (SEQ ID NO:49). The location of the variant protein was determined according to results from a number of different software programs and analyses, including analyses from SignalP and other specialized programs. The variant protein is believed to be located as follows with regard to the cell: secreted. The protein localization is believed to be secreted because both signal-peptide prediction programs predict that this protein has a signal peptide, and neither trans-membrane region prediction program predicts that this protein has a trans-membrane region.

[1886] Variant protein HSS100PCB_P3 (SEQ ID NO:580) also has the following non-silent SNPs (Single Nucleotide Polymorphisms) as listed in Table 7, (given according to their position(s) on the amino acid sequence, with the alternative amino acid(s) listed; the last column indicates whether the SNP is known or not; the presence of known SNPs in variant protein HSS100PCB_P3 (SEQ ID NO:580) sequence provides support for the deduced sequence of this variant protein according to the present invention).

[1887] Variant protein HSS100PCB_P3 (SEQ ID NO:580) is encoded by the following transcript(s): HSS100PCB_T1 (SEQ ID NO:49), for which the sequence(s) is/are given at the end of the application. The coding portion of transcript HSS100PCB_T1 (SEQ ID NO:49) is shown in bold; this coding portion starts at position 1057 and ends at position 1533. The transcript also has the following SNPs as listed in Table 8 (given according to their position on the nucleotide sequence, with the alternative nucleic acid listed; the last column indicates whether the SNP is known or not; the presence of known SNPs in variant protein HSS100PCB_P3 (SEQ ID NO:580) sequence provides support for the deduced sequence of this variant protein according to the present invention).

[1888] As noted above, cluster HSS100PCB features 3 segment(s), which were listed in Table 2 above and for which the sequence(s) are given at the end of the application. These segment(s) are portions of nucleic acid sequence(s) which are described herein separately because they are of particular interest. A description of each segment according to the present invention is now provided.

[1889] Segment cluster HSS100PCB_node_{—}3 (SEQ ID NO:363) according to the present invention is supported by 16 libraries. The number of libraries was determined as previously described. This segment can be found in the following transcript(s): HSS100PCB_T1 (SEQ ID NO:49). Table 9 below describes the starting and ending position of this segment on each transcript.

[1890] Segment cluster HSS100PCB_node_{—}4 (SEQ ID NO:364) according to the present invention is supported by 29 libraries. The number of libraries was determined as previously described. This segment can be found in the following transcript(s): HSS100PCB_T1 (SEQ ID NO:49). Table 10 below describes the starting and ending position of this segment on each transcript.

[1891] Microarray (chip) data is also available for this segment as follows. As described above with regard to the cluster itself, various oligonucleotides were tested for being differentially expressed in various disease conditions, particularly cancer. The following oligonucleotides were found to hit this segment (related to colon cancer), shown in Table 11.

[1892] Segment cluster HSS100PCB_node_{—}5 (SEQ ID NO:365) according to the present invention is supported by 141 libraries. The number of libraries was determined as previously described. This segment can be found in the following transcript(s): HSS100PCB_T1 (SEQ ID NO:49). Table 12 below describes the starting and ending position of this segment on each transcript.

Description for Cluster HUMPHOSLIP

[1893] Cluster HUMPHOSLIP features 7 transcript(s) and 53 segment(s) of interest, the names for which are given in Tables 1 and 2, respectively, the sequences themselves are given at the end of the application. The selected protein variants are given in table 3.

[1894] These sequences are variants of the known protein Phospholipid transfer protein precursor (SwissProt accession identifier PLTP_HUMAN; known also according to the synonyms Lipid transfer protein II), SEQ ID NO: 636, referred to herein as the previously known protein.

[1895] Protein Phospholipid transfer protein precursor (SEQ ID NO:636) is known or believed to have the following function(s): Converts HDL into larger and smaller particles. May play a key role in extracellular phospholipid transport and modulation of hdl particles. The sequence for protein Phospholipid transfer protein precursor is given at the end of the application, as “Phospholipid transfer protein precursor amino acid sequence”. Known polymorphisms for this sequence are as shown in Table 4.

[1896] Protein Phospholipid transfer protein precursor (SEQ ID NO:636) localization is believed to be Secreted.

[1897] The following GO Annotation(s) apply to the previously known protein. The following annotation(s) were found: lipid metabolism; lipid transport, which are annotation(s) related to Biological Process; lipid binding, which are annotation(s) related to Molecular Function; and extracellular, which are annotation(s) related to Cellular Component.

[1898] The GO assignment relies on information from one or more of the SwissProt/TremB1 Protein knowledgebase, available from <http://www.expasy.ch/sprot/>; or Locuslink, available from <http://www.ncbi.nlm.nih.gov/projects/LocusLink/>.

[1899] For this cluster, at least one oligonucleotide was found to demonstrate overexpression of the cluster, although not of at least one transcript/segment as listed below. Microarray (chip) data is also available for this cluster as follows. Various oligonucleotides were tested for being differentially expressed in various disease conditions, particularly cancer, as previously described. The following oligonucleotides were found to hit this cluster (in relation to colon cancer) but not other segments/transcripts below, shown in Table 5.

[1900] As noted above, cluster HUMPHOSLIP features 7 transcript(s), which were listed in Table 1 above. These transcript(s) encode for protein(s) which are variant(s) of protein Phospholipid transfer protein precursor (SEQ ID NO:636). A description of each variant protein according to the present invention is now provided.

[1901] Variant protein HUMPHOSLIP_PEA_{—}2_P10 (SEQ ID NO:581) according to the present invention has an amino acid sequence as given at the end of the application; it is encoded by transcript(s) HUMPHOSLIP_PEA_{—}2_T17 (SEQ ID NO:54). An alignment is given to the known protein (Phospholipid transfer protein precursor (SEQ ID NO:636)) at the end of the application. One or more alignments to one or more previously published protein sequences are given at the end of the application. A brief description of the relationship of the variant protein according to the present invention to each such aligned protein is as follows:

[1902] Comparison report between HUMPHOSLIP_PEA_{—}2_P10 (SEQ ID NO:581) and PLTP_HUMAN (SEQ ID NO:636):

[1903] 1. An isolated chimeric polypeptide encoding for HUMPHOSLIP_PEA_{—}2_P10 (SEQ ID NO:581), comprising a first amino acid sequence being at least 90% homologous to MALFGALFLALLAGAHAEFPGCKIRVTSKALELVKQEGLRFLEQELETITIPDLRGKEGH FYYNISE corresponding to amino acids 1-67 of PLTP_HUMAN (SEQ ID NO:636), which also corresponds to amino acids 1-67 of HUMPHOSLIP_PEA_{—}2_P10 (SEQ ID NO:581), and a second amino acid sequence being at least 90% homologous to KVYDFLSTFITSGMRFLLNQQICPVLYHAGTVLLNSLLDTVPVRSSVDELVGIDYSLMK DPVASTSNLDMDFRGAFFPLTERNWSLPNRAVEPQLQEEERMVYVAFSEFFFDSAMES YFRAGALQLLLVGDKVPHDLDMLLRATYFGSIVLLSPAVIDSPLKLELRVLAPPRCTIKP SGTTISVTASVTIALVPPDQPEVQLSSMTMDARLSAKMALRGKALRTQLDLRRFRIYSN HSALESLALIPLQAPLKTMLQIGVMPMLNERTWRGVQIPLPEGINFVHEVVTNHAGFLTI GADLHFAKGLREVIEKNRPADVRASTAPTPSTAAV corresponding to amino acids 163-493 of PLTP_HUMAN (SEQ ID NO:636), which also corresponds to amino acids 68-398 of HUMPHOSLIP_PEA_{—}2_P10 (SEQ ID NO:581), wherein said first amino acid sequence and second amino acid sequence are contiguous and in a sequential order.

[1904] 2. An isolated chimeric polypeptide encoding for an edge portion of HUMPHOSLIP_PEA_{—}2_P10 (SEQ ID NO:581), comprising a polypeptide having a length “n”, wherein n is at least about 10 amino acids in length, optionally at least about 20 amino acids in length, preferably at least about 30 amino acids in length, more preferably at least about 40 amino acids in length and most preferably at least about 50 amino acids in length, wherein at least two amino acids comprise EK, having a structure as follows: a sequence starting from any of amino acid numbers 67−x to 67; and ending at any of amino acid numbers 68+((n−2)−x), in which x varies from 0 to n−2.

[1905] The location of the variant protein was determined according to results from a number of different software programs and analyses, including analyses from SignalP and other specialized programs. The variant protein is believed to be located as follows with regard to the cell: secreted. The protein localization is believed to be secreted because both signal-peptide prediction programs predict that this protein has a signal peptide, and neither trans-membrane region prediction program predicts that this protein has a trans-membrane region.

[1906] Variant protein HUMPHOSLIP_PEA_{—}2_P10 (SEQ ID NO:581) also has the following non-silent SNPs (Single Nucleotide Polymorphisms) as listed in Table 6, (given according to their position(s) on the amino acid sequence, with the alternative amino acid(s) listed; the last column indicates whether the SNP is known or not; the presence of known SNPs in variant protein HUMPHOSLIP_PEA_{—}2_P10 (SEQ ID NO:581) sequence provides support for the deduced sequence of this variant protein according to the present invention).

[1907] The glycosylation sites of variant protein HUMPHOSLIP_PEA_{—}2_P10 (SEQ ID NO:581) as compared to the known protein Phospholipid transfer protein precursor (SEQ ID NO:636), are described in Table 7 (given according to their position(s) on the amino acid sequence in the first column; the second column indicates whether the glycosylation site is present in the variant protein; and the last column indicates whether the position is different on the variant protein).

[1908] Variant protein HUMPHOSLIP_PEA_{—}2_P10 (SEQ ID NO:581) is encoded by the following transcript(s): HUMPHOSLIP_PEA_{—}2_T17 (SEQ ID NO:54), for which the sequence(s) is/are given at the end of the application. The coding portion of transcript HUMPHOSLIP_PEA_{—}2_T17 (SEQ ID NO:54) is shown in bold; this coding portion starts at position 276 and ends at position 1469. The transcript also has the following SNPs as listed in Table 8 (given according to their position on the nucleotide sequence, with the alternative nucleic acid listed; the last column indicates whether the SNP is known or not; the presence of known SNPs in variant protein HUMPHOSLIP_PEA_{—}2_P10 (SEQ ID NO:581) sequence provides support for the deduced sequence of this variant protein according to the present invention).

[1909] Variant protein HUMPHOSLIP_PEA_{—}2_P12 (SEQ ID NO:582) according to the present invention has an amino acid sequence as given at the end of the application; it is encoded by transcript(s) HUMPHOSLIP_PEA_{—}2_T19 (SEQ ID NO:56). An alignment is given to the known protein (Phospholipid transfer protein precursor (SEQ ID NO:636)) at the end of the application. One or more alignments to one or more previously published protein sequences are given at the end of the application. A brief description of the relationship of the variant protein according to the present invention to each such aligned protein is as follows:

[1910] Comparison report between HUMPHOSLIP_PEA_{—}2_P12 (SEQ ID NO:582) and PLTP_HUMAN (SEQ ID NO:636):

[1911] 1. An isolated chimeric polypeptide encoding for HUMPHOSLIP_PEA_{—}2_P12 (SEQ ID NO:582), comprising a first amino acid sequence being at least 90% homologous to MALFGALFLALLAGAHAEFPGCKIRVTSKALELVKQEGLRFLEQELETITIPDLRGKEGH FYYNISEVKVTELQLTSSELDFQPQQELMLQITNASLGLRFRRQLLYWFFYDGGYINAS AEGVSIRTGLELSRDPAGRMKVSNVSCQASVSRMHAAFGGTFKKVYDFLSTFITSGMRF LLNQQICPVLYHAGTVLLNSLLDTVPVRSSVDELVGIDYSLMKDPVASTSNLDMDFRG AFFPLTERNWSLPNRAVEPQLQEEERMVYVAFSEFFFDSAMESYFRAGALQLLLVGDK VPHDLDMLLRATYFGSIVLLSPAVIDSPLKLELRVLAPPRCTIKPSGTTISVTASVTIALVP PDQPEVQLSSMTMDARLSAKMALRGKALRTQLDLRRFRIYSNHSALESLALIPLQAPLK TMLQIGVMPMLN corresponding to amino acids 1-427 of PLTP_HUMAN (SEQ ID NO:636), which also corresponds to amino acids 1-427 of HUMPHOSLIP_PEA_{—}2_P12 (SEQ ID NO:582), and a second amino acid sequence being at least 70%, optionally at least 80%, preferably at least 85%, more preferably at least 90% and most preferably at least 95% homologous to a polypeptide having the sequence GKAGV (SEQ ID NO:1525) corresponding to amino acids 428-432 of HUMPHOSLIP_PEA_{—}2_P12 (SEQ ID NO:582), wherein said first amino acid sequence and second amino acid sequence are contiguous and in a sequential order.

[1912] 2. An isolated polypeptide encoding for a tail of HUMPHOSLIP_PEA_{—}2_P12 (SEQ ID NO:582), comprising a polypeptide being at least 70%, optionally at least about 80%, preferably at least about 85%, more preferably at least about 90% and most preferably at least about 95% homologous to the sequence GKAGV (SEQ ID NO:1525) in HUMPHOSLIP_PEA_{—}2_P12 (SEQ ID NO:582).

[1913] The location of the variant protein was determined according to results from a number of different software programs and analyses, including analyses from SignalP and other specialized programs. The variant protein is believed to be located as follows with regard to the cell: secreted. The protein localization is believed to be secreted because both signal-peptide prediction programs predict that this protein has a signal peptide, and neither trans-membrane region prediction program predicts that this protein has a trans-membrane region.

[1914] Variant protein HUMPHOSLIP_PEA_{—}2_P12 (SEQ ID NO:582) also has the following non-silent SNPs (Single Nucleotide Polymorphisms) as listed in Table 9, (given according to their position(s) on the amino acid sequence, with the alternative amino acid(s) listed; the last column indicates whether the SNP is known or not; the presence of known SNPs in variant protein HUMPHOSLIP_PEA_{—}2_P12 (SEQ ID NO:582) sequence provides support for the deduced sequence of this variant protein according to the present invention).

[1915] The glycosylation sites of variant protein HUMPHOSLIP_PEA_{—}2_P12 (SEQ ID NO:582), as compared to the known protein Phospholipid transfer protein precursor (SEQ ID NO:636), are described in Table 10 (given according to their position(s) on the amino acid sequence in the first column; the second column indicates whether the glycosylation site is present in the variant protein; and the last column indicates whether the position is different on the variant protein).

[1916] Variant protein HUMPHOSLIP_PEA_{—}2_P12 (SEQ ID NO:582) is encoded by the following transcript(s): HUMPHOSLIP_PEA_{—}2_T19 (SEQ ID NO:56), for which the sequence(s) is/are given at the end of the application. The coding portion of transcript HUMPHOSLIP_PEA_{—}2_T19 (SEQ ID NO:56) is shown in bold; this coding portion starts at position 276 and ends at position 1571. The transcript also has the following SNPs as listed in Table 11 (given according to their position on the nucleotide sequence, with the alternative nucleic acid listed; the last column indicates whether the SNP is known or not; the presence of known SNPs in variant protein HUMPHOSLIP_PEA_{—}2_P12 (SEQ ID NO:582) sequence provides support for the deduced sequence of this variant protein according to the present invention).

[1917] Variant protein HUMPHOSLIP_PEA_{—}2_P30 (SEQ ID NO:583) according to the present invention has an amino acid sequence as given at the end of the application; it is encoded by transcript(s) HUMPHOSLIP_PEA_{—}2_T6 (SEQ ID NO:50). The location of the variant protein was determined according to results from a number of different software programs and analyses, including analyses from SignalP and other specialized programs. The variant protein is believed to be located as follows with regard to the cell: secreted. The protein localization is believed to be secreted because both signal-peptide prediction programs predict that this protein has a signal peptide, and neither trans-membrane region prediction program predicts that this protein has a trans-membrane region.

[1918] Variant protein HUMPHOSLIP_PEA_{—}2_P30 (SEQ ID NO:583) also has the following non-silent SNPs (Single Nucleotide Polymorphisms) as listed in Table 12, (given according to their position(s) on the amino acid sequence, with the alternative amino acid(s) listed; the last column indicates whether the SNP is known or not; the presence of known SNPs in variant protein HUMPHOSLIP_PEA_{—}2_P30 (SEQ ID NO:583) sequence provides support for the deduced sequence of this variant protein according to the present invention).

[1919] Variant protein HUMPHOSLIP_PEA_{—}2_P30 (SEQ ID NO:583) is encoded by the following transcript(s): HUMPHOSLIP_PEA_{—}2_T6 (SEQ ID NO:50), for which the sequence(s) is/are given at the end of the application. The coding portion of transcript HUMPHOSLIP_PEA_{—}2_T6 (SEQ ID NO:50) is shown in bold; this coding portion starts at position 276 and ends at position 431. The transcript also has the following SNPs as listed in Table 13 (given according to their position on the nucleotide sequence, with the alternative nucleic acid listed; the last column indicates whether the SNP is known or not; the presence of known SNPs in variant protein HUMPHOSLIP_PEA_{—}2_P30 (SEQ ID NO:583) sequence provides support for the deduced sequence of this variant protein according to the present invention).

[1920] Variant protein HUMPHOSLIP_PEA_{—}2_P31 (SEQ ID NO:584) according to the present invention has an amino acid sequence as given at the end of the application; it is encoded by transcript(s) HUMPHOSLIP_PEA_{—}2_T7 (SEQ ID NO:51). An alignment is given to the known protein (Phospholipid transfer protein precursor (SEQ ID NO:636)) at the end of the application. One or more alignments to one or more previously published protein sequences are given at the end of the application. A brief description of the relationship of the variant protein according to the present invention to each such aligned protein is as follows:

[1921] Comparison report between HUMPHOSLIP_PEA_{—}2_P31 (SEQ ID NO:584) and PLTP_HUMAN (SEQ ID NO:636):

[1922] 1. An isolated chimeric polypeptide encoding for HUMPHOSLIP_PEA_{—}2_P31 (SEQ ID NO:584), comprising a first amino acid sequence being at least 90% homologous to MALFGALFLALLAGAHAEFPGCKIRVTSKALELVKQEGLRFLEQELETITIPDLRGKEGH FYYNISE corresponding to amino acids 1-67 of PLTP_HUMAN (SEQ ID NO:636), which also corresponds to amino acids 1-67 of HUMPHOSLIP_PEA_{—}2_P31 (SEQ ID NO:584), and a second amino acid sequence being at least 70%, optionally at least 80%, preferably at least 85%, more preferably at least 90% and most preferably at least 95% homologous to a polypeptide having the sequence PGLERGADKFPVVGGSSLFLALDLTLRPPVG (SEQ ID NO:1526) corresponding to amino acids 68-98 of HUMPHOSLIP_PEA_{—}2_P31 (SEQ ID NO:584), wherein said first amino acid sequence and second amino acid sequence are contiguous and in a sequential order.

[1923] 2. An isolated polypeptide encoding for a tail of HUMPHOSLIP_PEA_{—}2_P31 (SEQ ID NO:584), comprising a polypeptide being at least 70%, optionally at least about 80%, preferably at least about 85%, more preferably at least about 90% and most preferably at least about 95% homologous to the sequence PGLERGADKFPVVGGSSLFLALDLTLRPPVG (SEQ ID NO:1526) in HUMPHOSLIP_PEA_{—}2_P31 (SEQ ID NO:584).

[1924] The location of the variant protein was determined according to results from a number of different software programs and analyses, including analyses from SignalP and other specialized programs. The variant protein is believed to be located as follows with regard to the cell: secreted. The protein localization is believed to be secreted because both signal-peptide prediction programs predict that this protein has a signal peptide, and neither trans-membrane region prediction program predicts that this protein has a trans-membrane region.

[1925] Variant protein HUMPHOSLIP_PEA_{—}2_P31 (SEQ ID NO:584) also has the following non-silent SNPs (Single Nucleotide Polymorphisms) as listed in Table 14, (given according to their position(s) on the amino acid sequence, with the alternative amino acid(s) listed; the last column indicates whether the SNP is known or not; the presence of known SNPs in variant protein HUMPHOSLIP_PEA_{—}2_P31 (SEQ ID NO:584) sequence provides support for the deduced sequence of this variant protein according to the present invention).

[1926] The glycosylation sites of variant protein HUMPHOSLIP_PEA_{—}2_P31 (SEQ ID NO:584), as compared to the known protein Phospholipid transfer protein precursor (SEQ ID NO:636), are described in Table 15 (given according to their position(s) on the amino acid sequence in the first column; the second column indicates whether the glycosylation site is present in the variant protein; and the last column indicates whether the position is different on the variant protein).

[1927] Variant protein HUMPHOSLIP_PEA_{—}2_P31 (SEQ ID NO:584) is encoded by the following transcript(s): HUMPHOSLIP_PEA_{—}2_T7 (SEQ ID NO:51), for which the sequence(s) is/are given at the end of the application. The coding portion of transcript HUMPHOSLIP_PEA_{—}2_T7 (SEQ ID NO:51) is shown in bold; this coding portion starts at position 276 and ends at position 569. The transcript also has the following SNPs as listed in Table 16 (given according to their position on the nucleotide sequence, with the alternative nucleic acid listed; the last column indicates whether the SNP is known or not; the presence of known SNPs in variant protein HUMPHOSLIP_PEA_{—}2_P31 (SEQ ID NO:584) sequence provides support for the deduced sequence of this variant protein according to the present invention).

[1928] Variant protein HUMPHOSLIP_PEA_{—}2_P33 (SEQ ID NO:585) according to the present invention has an amino acid sequence as given at the end of the application; it is encoded by transcript(s) HUMPHOSLIP_PEA_{—}2_T14 (SEQ ID NO:52). An alignment is given to the known protein (Phospholipid transfer protein precursor (SEQ ID NO:636)) at the end of the application. One or more alignments to one or more previously published protein sequences are given at the end of the application. A brief description of the relationship of the variant protein according to the present invention to each such aligned protein is as follows:

[1929] Comparison report between HUMPHOSLIP_PEA_{—}2_P33 (SEQ ID NO:585) and PLTP_HUMAN (SEQ ID NO:636):

[1930] 1. An isolated chimeric polypeptide encoding for HUMPHOSLIP_PEA_{—}2_P33 (SEQ ID NO:585), comprising a first amino acid sequence being at least 90% homologous to MALFGALFLALLAGAHAEFPGCKIRVTSKALELVKQEGLRFLEQELETITIPDLRGKEGH FYYNISEVKVTELQLTSSELDFQPQQELMLQITNASLGLRFRRQLLYWFFYDGGYINAS AEGVSIRTGLELSRDPAGRMKVSNVSCQASVSRMHAAFGGTFKKVYDFLSTFITSGMRF LLNQQ corresponding to amino acids 1-183 of PLTP_HUMAN (SEQ ID NO:636), which also corresponds to amino acids 1-183 of HUMPHOSLIP_PEA_{—}2_P33 (SEQ ID NO:585), and a second amino acid sequence being at least 70%, optionally at least 80%, preferably at least 85%, more preferably at least 90% and most preferably at least 95% homologous to a polypeptide having the sequence VWAATGRRVARVGMLSL (SEQ ID NO:1527) corresponding to amino acids 184-200 of HUMPHOSLIP_PEA_{—}2_P33 (SEQ ID NO:585), wherein said first amino acid sequence and second amino acid sequence are contiguous and in a sequential order.

[1931] 2. An isolated polypeptide encoding for a tail of HUMPHOSLIP_PEA_{—}2_P33 (SEQ ID NO:585), comprising a polypeptide being at least 70%, optionally at least about 80%, preferably at least about 85%, more preferably at least about 90% and most preferably at least about 95% homologous to the sequence VWAATGRRVARVGMLSL (SEQ ID NO:1527) in HUMPHOSLIP_PEA_{—}2_P33 (SEQ ID NO:585).

[1932] The location of the variant protein was determined according to results from a number of different software programs and analyses, including analyses from SignalP and other specialized programs. The variant protein is believed to be located as follows with regard to the cell: secreted. The protein localization is believed to be secreted because both signal-peptide prediction programs predict that this protein has a signal peptide, and neither trans-membrane region prediction program predicts that this protein has a trans-membrane region.

[1933] Variant protein HUMPHOSLIP_PEA_{—}2_P33 (SEQ ID NO:585) also has the following non-silent SNPs (Single Nucleotide Polymorphisms) as listed in Table 17, (given according to their position(s) on the amino acid sequence, with the alternative amino acid(s) listed; the last column indicates whether the SNP is known or not; the presence of known SNPs in variant protein HUMPHOSLIP_PEA_{—}2_P33 (SEQ ID NO:585) sequence provides support for the deduced sequence of this variant protein according to the present invention).

[1934] The glycosylation sites of variant protein HUMPHOSLIP_PEA_{—}2_P33 (SEQ ID NO:585) as compared to the known protein Phospholipid transfer protein precursor (SEQ ID NO:636), are described in Table 18 (given according to their position(s) on the amino acid sequence in the first column; the second column indicates whether the glycosylation site is present in the variant protein; and the last column indicates whether the position is different on the variant protein).

[1935] Variant protein HUMPHOSLIP_PEA_{—}2_P33 (SEQ ID NO:585) is encoded by the following transcript(s): HUMPHOSLIP_PEA_{—}2_T14 (SEQ ID NO:52), for which the sequence(s) is/are given at the end of the application. The coding portion of transcript HUMPHOSLIP_PEA_{—}2_T14 (SEQ ID NO:52) is shown in bold; this coding portion starts at position 276 and ends at position 875. The transcript also has the following SNPs as listed in Table 19 (given according to their position on the nucleotide sequence, with the alternative nucleic acid listed; the last column indicates whether the SNP is known or not; the presence of known SNPs in variant protein HUMPHOSLIP_PEA_{—}2_P33 (SEQ ID NO:585) sequence provides support for the deduced sequence of this variant protein according to the present invention).

[1936] Variant protein HUMPHOSLIP_PEA_{—}2_P34 (SEQ ID NO:586) according to the present invention has an amino acid sequence as given at the end of the application; it is encoded by transcript(s) HUMPHOSLIP_PEA_{—}2_T16 (SEQ ID NO:53). An alignment is given to the known protein (Phospholipid transfer protein precursor (SEQ ID NO:636)) at the end of the application. One or more alignments to one or more previously published protein sequences are given at the end of the application. A brief description of the relationship of the variant protein according to the present invention to each such aligned protein is as follows:

[1937] Comparison report between HUMPHOSLIP_PEA_{—}2_P34 (SEQ ID NO:586) and PLTP_HUMAN (SEQ ID NO:636):

[1938] 1. An isolated chimeric polypeptide encoding for HUMPHOSLIP_PEA_{—}2_P34 (SEQ ID NO:586), comprising a first amino acid sequence being at least 90% homologous to MALFGALFLALLAGAHAEFPGCKIRVTSKALELVKQEGLRFLEQELETITIPDLRGKEGH FYYNISEVKVTELQLTSSELDFQPQQELMLQITNASLGLRFRRQLLYWFFYDGGYINAS AEGVSIRTGLELSRDPAGRMKVSNVSCQASVSRMHAAFGGTFKKVYDFLSTFITSGMRF LLNQQICPVLYHAGTVLLNSLLDTVPV corresponding to amino acids 1-205 of PLTP_HUMAN (SEQ ID NO:636), which also corresponds to amino acids 1-205 of HUMPHOSLIP_PEA_{—}2_P34 (SEQ ID NO:586), and a second amino acid sequence being at least 70%, optionally at least 80%, preferably at least 85%, more preferably at least 90% and most preferably at least 95% homologous to a polypeptide having the sequence LWTSLLALTIPS (SEQ ID NO:1528) corresponding to amino acids 206-217 of HUMPHOSLIP_PEA_{—}2_P34 (SEQ ID NO:586), wherein said first amino acid sequence and second amino acid sequence are contiguous and in a sequential order.

[1939] 2. An isolated polypeptide encoding for a tail of HUMPHOSLIP_PEA_{—}2_P34 (SEQ ID NO:586), comprising a polypeptide being at least 70%, optionally at least about 80%, preferably at least about 85%, more preferably at least about 90% and most preferably at least about 95% homologous to the sequence LWTSLLALTIPS (SEQ ID NO:1528) in HUMPHOSLIP_PEA_{—}2_P34 (SEQ ID NO:586).

[1940] The location of the variant protein was determined according to results from a number of different software programs and analyses, including analyses from SignalP and other specialized programs. The variant protein is believed to be located as follows with regard to the cell: secreted. The protein localization is believed to be secreted because both signal-peptide prediction programs predict that this protein has a signal peptide, and neither trans-membrane region prediction program predicts that this protein has a trans-membrane region.

[1941] Variant protein HUMPHOSLIP_PEA_{—}2_P34 (SEQ ID NO:586) also has the following non-silent SNPs (Single Nucleotide Polymorphisms) as listed in Table 20, (given according to their position(s) on the amino acid sequence, with the alternative amino acid(s) listed; the last column indicates whether the SNP is known or not; the presence of known SNPs in variant protein HUMPHOSLIP_PEA_{—}2_P34 (SEQ ID NO:586) sequence provides support for the deduced sequence of this variant protein according to the present invention).

[1942] The glycosylation sites of variant protein HUMPHOSLIP_PEA_{—}2_P34 (SEQ ID NO:586) as compared to the known protein Phospholipid transfer protein precursor (SEQ ID NO:636), are described in Table 21 (given according to their position(s) on the amino acid sequence in the first column; the second column indicates whether the glycosylation site is present in the variant protein; and the last column indicates whether the position is different on the variant protein).

[1943] Variant protein HUMPHOSLIP_PEA_{—}2_P34 (SEQ ID NO:586) is encoded by the following transcript(s): HUMPHOSLIP_PEA_{—}2_T16 (SEQ ID NO:53), for which the sequence(s) is/are given at the end of the application. The coding portion of transcript HUMPHOSLIP_PEA_{—}2_T16 (SEQ ID NO:53) is shown in bold; this coding portion starts at position 276 and ends at position 926. The transcript also has the following SNPs as listed in Table 22 (given according to their position on the nucleotide sequence, with the alternative nucleic acid listed; the last column indicates whether the SNP is known or not; the presence of known SNPs in variant protein HUMPHOSLIP_PEA_{—}2_P34 (SEQ ID NO:586) sequence provides support for the deduced sequence of this variant protein according to the present invention).

[1944] Variant protein HUMPHOSLIP_PEA_{—}2_P35 (SEQ ID NO:587) according to the present invention has an amino acid sequence as given at the end of the application; it is encoded by transcript(s) HUMPHOSLIP_PEA_{—}2_T18 (SEQ ID NO:55). An alignment is given to the known protein (Phospholipid transfer protein precursor (SEQ ID NO:636)) at the end of the application. One or more alignments to one or more previously published protein sequences are given at the end of the application. A brief description of the relationship of the variant protein according to the present invention to each such aligned protein is as follows:

[1945] Comparison report between HUMPHOSLIP_PEA_{—}2_P35 (SEQ ID NO:587) and PLTP_HUMAN (SEQ ID NO:636):

[1946] 1. An isolated chimeric polypeptide encoding for HUMPHOSLIP_PEA_{—}2_P35 (SEQ ID NO:587), comprising a first amino acid sequence being at least 90% homologous to MALFGALFLALLAGAHAEFPGCKIRVTSKALELVKQEGLRFLEQELETITIPDLRGKEGH FYYNISEVKVTELQLTSSELDFQPQQELMLQITNASLGLRFRRQLLYWF corresponding to amino acids 1-109 of PLTP_HUMAN (SEQ ID NO:636), which also corresponds to amino acids 1-109 of HUMPHOSLIP_PEA_{—}2_P35 (SEQ ID NO:587), a second amino acid sequence bridging amino acid sequence comprising of L, a third amino acid sequence being at least 90% homologous to KVYDFLSTFITSGMRFLLNQQ corresponding to amino acids 163-183 of PLTP_HUMAN (SEQ ID NO:636), which also corresponds to amino acids 111-131 of HUMPHOSLIP_PEA_{—}2_P35 (SEQ ID NO:587), and a fourth amino acid sequence being at least 70%, optionally at least 80%, preferably at least 85%, more preferably at least 90% and most preferably at least 95% homologous to a polypeptide having the sequence VWAATGRRVARVGMLSL (SEQ ID NO:1527) corresponding to amino acids 132-148 of HUMPHOSLIP_PEA_{—}2_P35 (SEQ ID NO:587), wherein said first amino acid sequence, second amino acid sequence, third amino acid sequence and fourth amino acid sequence are contiguous and in a sequential order.

[1947] 2. An isolated polypeptide encoding for an edge portion of HUMPHOSLIP_PEA_{—}2_P35 (SEQ ID NO:587), comprising a polypeptide having a length “n”, wherein n is at least about 10 amino acids in length, optionally at least about 20 amino acids in length, preferably at least about 30 amino acids in length, more preferably at least about 40 amino acids in length and most preferably at least about 50 amino acids in length, wherein at least two amino acids comprise

[1948] FLK having a structure as follows (numbering according to HUMPHOSLIP_PEA_{—}2_P35 (SEQ ID NO:587)): a sequence starting from any of amino acid numbers 109−x to 109; and ending at any of amino acid numbers 111+((n−2)−x), in which x varies from 0 to n−2.

[1949] 3. An isolated polypeptide encoding for a tail of HUMPHOSLIP_PEA_{—}2_P35 (SEQ ID NO:587), comprising a polypeptide being at least 70%, optionally at least about 80%, preferably at least about 85%, more preferably at least about 90% and most preferably at least about 95% homologous to the sequence VWAATGRRVARVGMLSL (SEQ ID NO:1527) in HUMPHOSLIP_PEA_{—}2_P35 (SEQ ID NO:587).

[1950] The location of the variant protein was determined according to results from a number of different software programs and analyses, including analyses from SignalP and other specialized programs. The variant protein is believed to be located as follows with regard to the cell: secreted. The protein localization is believed to be secreted because both signal-peptide prediction programs predict that this protein has a signal peptide, and neither trans-membrane region prediction program predicts that this protein has a trans-membrane region.

[1951] Variant protein HUMPHOSLIP_PEA_{—}2_P35 (SEQ ID NO:587) also has the following non-silent SNPs (Single Nucleotide Polymorphisms) as listed in Table 23, (given according to their position(s) on the amino acid sequence, with the alternative amino acid(s) listed; the last column indicates whether the SNP is known or not; the presence of known SNPs in variant protein HUMPHOSLIP_PEA_{—}2_P35 (SEQ ID NO:587) sequence provides support for the deduced sequence of this variant protein according to the present invention).

[1952] The glycosylation sites of variant protein HUMPHOSLIP_PEA_{—}2_P35 (SEQ ID NO:587), as compared to the known protein Phospholipid transfer protein precursor (SEQ ID NO:636), are described in Table 24 (given according to their position(s) on the amino acid sequence in the first column; the second column indicates whether the glycosylation site is present in the variant protein; and the last column indicates whether the position is different on the variant protein).

[1953] Variant protein HUMPHOSLIP_PEA_{—}2_P35 (SEQ ID NO:587) is encoded by the following transcript(s): HUMPHOSLIP_PEA_{—}2_T18 (SEQ ID NO:55), for which the sequence(s) is/are given at the end of the application. The coding portion of transcript HUMPHOSLIP_PEA_{—}2_T18 (SEQ ID NO:55) is shown in bold; this coding portion starts at position 276 and ends at position 719. The transcript also has the following SNPs as listed in Table 25 (given according to their position on the nucleotide sequence, with the alternative nucleic acid listed; the last column indicates whether the SNP is known or not; the presence of known SNPs in variant protein HUMPHOSLIP_PEA_{—}2_P35 (SEQ ID NO:587) sequence provides support for the deduced sequence of this variant protein according to the present invention).

[1954] As noted above, cluster HUMPHOSLIP features 53 segment(s), which were listed in Table 2 above and for which the sequence(s) are given at the end of the application. These segment(s) are portions of nucleic acid sequence(s) which are described herein separately because they are of particular interest. A description of each segment according to the present invention is now provided.

[1955] Segment cluster HUMPHOSLIP_PEA_{—}2_node_{—}0 (SEQ ID NO:366) according to the present invention is supported by 150 libraries. The number of libraries was determined as previously described. This segment can be found in the following transcript(s): HUMPHOSLIP_PEA_{—}2_T6 (SEQ ID NO:50), HUMPHOSLIP_PEA_{—}2_T7 (SEQ ID NO:51), HUMPHOSLIP_PEA_{—}2_T14 (SEQ ID NO:52), HUMPHOSLIP_PEA_{—}2_T16 (SEQ ID NO:53), HUMPHOSLIP_PEA_{—}2_T17 (SEQ ID NO:54), HUMPHOSLIP_PEA_{—}2_T18 (SEQ ID NO:55) and HUMPHOSLIP_PEA_{—}2_T19 (SEQ ID NO:56). Table 26 below describes the starting and ending position of this segment on each transcript.

[1956] Segment cluster HUMPHOSLIP_PEA_{—}2_node_{—}19 (SEQ ID NO:367) according to the present invention is supported by 186 libraries. The number of libraries was determined as previously described. This segment can be found in the following transcript(s): HUMPHOSLIP_PEA_{—}2_T6 (SEQ ID NO:50, HUMPHOSLIP_PEA_{—}2_T7 (SEQ ID NO:51), HUMPHOSLIP_PEA_{—}2_T14 (SEQ ID NO:52), HUMPHOSLIP_PEA_{—}2_T16 (SEQ ID NO:53) and HUMPHOSLIP_PEA_{—}2_T19 (SEQ ID NO:56). Table 27 below describes the starting and ending position of this segment on each transcript.

[1957] Segment cluster HUMPHOSLIP_PEA_{—}2_node_{—}34 (SEQ ID NO:368) according to the present invention is supported by 191 libraries. The number of libraries was determined as previously described. This segment can be found in the following transcript(s): HUMPHOSLIP_PEA_{—}2_T6 (SEQ ID NO:50), HUMPHOSLIP_PEA_{—}2_T7 (SEQ ID NO:51), HUMPHOSLIP_PEA_{—}2_T14 (SEQ ID NO:52, HUMPHOSLIP_PEA_{—}2_T16 (SEQ ID NO:53), HUMPHOSLIP_PEA_{—}2_T17 (SEQ ID NO:54), HUMPHOSLIP_PEA_{—}2_T18 (SEQ ID NO:55) and HUMPHOSLIP_PEA_{—}2_T19 (SEQ ID NO:56). Table 28 below describes the starting and ending position of this segment on each transcript.

[1958] Segment cluster HUMPHOSLIP_PEA_{—}2_node_{—}68 (SEQ ID NO:369) according to the present invention is supported by 131 libraries. The number of libraries was determined as previously described. This segment can be found in the following transcript(s): HUMPHOSLIP_PEA_{—}2_T6 (SEQ ID NO:50, HUMPHOSLIP_PEA_{—}2_T7 (SEQ ID NO:51), HUMPHOSLIP_PEA_{—}2_T14 (SEQ ID NO:52), HUMPHOSLIP_PEA_{—}2_T16 (SEQ ID NO:53), HUMPHOSLIP_PEA_{—}2_T17 (SEQ ID NO:54), HUMPHOSLIP_PEA_{—}2_T18 (SEQ ID NO:55) and HUMPHOSLIP_PEA_{—}2_T19 (SEQ ID NO:56). Table 29 below describes the starting and ending position of this segment on each transcript.

[1959] Segment cluster HUMPHOSLIP_PEA_{—}2_node_{—}70 (SEQ ID NO:370) according to the present invention is supported by 5 libraries. The number of libraries was determined as previously described. This segment can be found in the following transcript(s): HUMPHOSLIP_PEA_{—}2_T6 (SEQ ID NO:50), HUMPHOSLIP_PEA_{—}2_T7 (SEQ ID NO:51), HUMPHOSLIP_PEA_{—}2_T14 (SEQ ID NO:52), HUMPHOSLIP_PEA_{—}2_T16 (SEQ ID NO:53), HUMPHOSLIP_PEA_{—}2_T17 (SEQ ID NO:54), HUMPHOSLIP_PEA_{—}2_T18 (SEQ ID NO:55) and HUMPHOSLIP_PEA_{—}2_T19 (SEQ ID NO:56). Table 30 below describes the starting and ending position of this segment on each transcript.

[1960] Segment cluster HUMPHOSLIP_PEA_{—}2_node_{—}75 (SEQ ID NO:371) according to the present invention is supported by 14 libraries. The number of libraries was determined as previously described. This segment can be found in the following transcript(s): HUMPHOSLIP_PEA_{—}2_T6 (SEQ ID NO:50, HUMPHOSLIP_PEA_{—}2_T7 (SEQ ID NO:51), HUMPHOSLIP_PEA_{—}2_T14 (SEQ ID NO:52), HUMPHOSLIP_PEA_{—}2_T16 (SEQ ID NO:53), HUMPHOSLIP_PEA_{—}2_T17 (SEQ ID NO:54), HUMPHOSLIP_PEA_{—}2_T18 (SEQ ID NO:55) and HUMPHOSLIP_PEA_{—}2_T19 (SEQ ID NO:56). Table 31 below describes the starting and ending position of this segment on each transcript.

[1961] According to an optional embodiment of the present invention, short segments related to the above cluster are also provided. These segments are up to about 120 bp in length, and so are included in a separate description.

[1962] Segment cluster HUMPHOSLIP_PEA_{—}2_node_{—}2 (SEQ ID NO:372) according to the present invention is supported by 159 libraries. The number of libraries was determined as previously described. This segment can be found in the following transcript(s): HUMPHOSLIP_PEA_{—}2_T6 (SEQ ID NO:50), HUMPHOSLIP_PEA_{—}2_T7 (SEQ ID NO:51), HUMPHOSLIP_PEA_{—}2_T14 (SEQ ID NO:52), HUMPHOSLIP_PEA_{—}2_T16 (SEQ ID NO:53), HUMPHOSLIP_PEA_{—}2_T17 (SEQ ID NO:54), HUMPHOSLIP_PEA_{—}2_T18 (SEQ ID NO:55) and HUMPHOSLIP_PEA_{—}2_T19 (SEQ ID NO:56). Table 32 below describes the starting and ending position of this segment on each transcript.

[1963] Segment cluster HUMPHOSLIP_PEA_{—}2_node_{—}3 (SEQ ID NO:373) according to the present invention can be found in the following transcript(s): HUMPHOSLIP_PEA_{—}2_T7 (SEQ ID NO:51), HUMPHOSLIP_PEA_{—}2_T14 (SEQ ID NO:52), HUMPHOSLIP_PEA_{—}2_T16 (SEQ ID NO:53), HUMPHOSLIP_PEA_{—}2_T17 (SEQ ID NO:54) HUMPHOSLIP_PEA_{—}2_T18 (SEQ ID NO:55) and HUMPHOSLIP_PEA_{—}2_T19 (SEQ ID NO:56). Table 33 below describes the starting and ending position of this segment on each transcript.

[1964] Segment cluster HUMPHOSLIP_PEA_{—}2_node_{—}4 (SEQ ID NO:374) according to the present invention can be found in the following transcript(s): HUMPHOSLIP_PEA_{—}2_T7 (SEQ ID NO:51), HUMPHOSLIP_PEA_{—}2_T14 (SEQ ID NO:52), HUMPHOSLIP_PEA_{—}2_T16 (SEQ ID NO:53), HUMPHOSLIP_PEA_{—}2_T17 (SEQ ID NO:54) HUMPHOSLIP_PEA_{—}2_T18 (SEQ ID NO:55) and HUMPHOSLIP_PEA_{—}2_T19 (SEQ ID NO:56). Table 34 below describes the starting and ending position of this segment on each transcript.

[1965] Segment cluster HUMPHOSLIP_PEA_{—}2_node_{—}6 (SEQ ID NO:375) according to the present invention can be found in the following transcript(s): HUMPHOSLIP_PEA_{—}2_T7 (SEQ ID NO:51), HUMPHOSLIP_PEA_{—}2_T14 (SEQ ID NO:52), HUMPHOSLIP_PEA_{—}2_T16 (SEQ ID NO:53), HUMPHOSLIP_PEA_{—}2_T17 (SEQ ID NO:54) HUMPHOSLIP_PEA_{—}2_T18 (SEQ ID NO:55) and HUMPHOSLIP_PEA_{—}2_T19 (SEQ ID NO:56). Table 35 below describes the starting and ending position of this segment on each transcript.

[1966] Segment cluster HUMPHOSLIP_PEA_{—}2_node_{—}7 (SEQ ID NO:376) according to the present invention can be found in the following transcript(s): HUMPHOSLIP_PEA_{—}2_T6 (SEQ ID NO:50), HUMPHOSLIP_PEA_{—}2_T7 (SEQ ID NO:51), HUMPHOSLIP_PEA_{—}2_T14 (SEQ ID NO:52), HUMPHOSLIP_PEA_{—}2_T16 (SEQ ID NO:53), HUMPHOSLIP_PEA_{—}2_T17 (SEQ ID NO:54), HUMPHOSLIP_PEA_{—}2_T18 (SEQ ID NO:55) and HUMPHOSLIP_PEA_{—}2_T19 (SEQ ID NO:56). Table 36 below describes the starting and ending position of this segment on each transcript.

[1967] Segment cluster HUMPHOSLIP_PEA_{—}2_node_{—}8 (SEQ ID NO:377) according to the present invention is supported by 171 libraries. The number of libraries was determined as previously described. This segment can be found in the following transcript(s): HUMPHOSLIP_PEA_{—}2_T6 (SEQ ID NO:50), HUMPHOSLIP_PEA_{—}2_T7 (SEQ ID NO:51), HUMPHOSLIP_PEA_{—}2_T14 (SEQ ID NO:52), HUMPHOSLIP_PEA_{—}2_T16 (SEQ ID NO:53), HUMPHOSLIP_PEA_{—}2_T17 (SEQ ID NO:54), HUMPHOSLIP_PEA_{—}2_T18 (SEQ ID NO:55) and HUMPHOSLIP_PEA_{—}2_T19 (SEQ ID NO:56). Table 37 below describes the starting and ending position of this segment on each transcript.

[1968] Segment cluster HUMPHOSLIP_PEA_{—}2_node_{—}9 (SEQ ID NO:378) according to the present invention is supported by 168 libraries. The number of libraries was determined as previously described. This segment can be found in the following transcript(s): HUMPHOSLIP_PEA_{—}2_T6 (SEQ ID NO:50, HUMPHOSLIP_PEA_{—}2_T7 (SEQ ID NO:51), HUMPHOSLIP_PEA_{—}2_T14 (SEQ ID NO:52), HUMPHOSLIP_PEA_{—}2_T16 (SEQ ID NO:53), HUMPHOSLIP_PEA_{—}2_T17 (SEQ ID NO:54), HUMPHOSLIP_PEA_{—}2_T18 (SEQ ID NO:55) and HUMPHOSLIP_PEA_{—}2_T19 (SEQ ID NO:56). Table 38 below describes the starting and ending position of this segment on each transcript.

[1969] Segment cluster HUMPHOSLIP_PEA_{—}2_node_{—}14 (SEQ ID NO:379) according to the present invention is supported by 6 libraries. The number of libraries was determined as previously described. This segment can be found in the following transcript(s): HUMPHOSLIP_PEA_{—}2_T7 (SEQ ID NO:51). Table 39 below describes the starting and ending position of this segment on each transcript.

[1970] Segment cluster HUMPHOSLIP_PEA_{—}2_node_{—}15 (SEQ ID NO:380) according to the present invention can be found in the following transcript(s): HUMPHOSLIP_PEA_{—}2_T6 (SEQ ID NO:50), HUMPHOSLIP_PEA_{—}2_T7 (SEQ ID NO:51, HUMPHOSLIP_PEA_{—}2_T14 (SEQ ID NO:52), HUMPHOSLIP_PEA_{—}2_T16 (SEQ ID NO:53), HUMPHOSLIP_PEA_{—}2_T18 (SEQ ID NO:55) and HUMPHOSLIP_PEA_{—}2_T19 (SEQ ID NO:56). Table 40 below describes the starting and ending position of this segment on each transcript.

[1971] Segment cluster HUMPHOSLIP_PEA_{—}2_node_{—}16 (SEQ ID NO:381) according to the present invention is supported by 179 libraries. The number of libraries was determined as previously described. This segment can be found in the following transcript(s): HUMPHOSLIP_PEA_{—}2_T6 (SEQ ID NO:50), HUMPHOSLIP_PEA_{—}2_T7 (SEQ ID NO:51), HUMPHOSLIP_PEA_{—}2_T14 (SEQ ID NO:52, HUMPHOSLIP_PEA_{—}2_T16 (SEQ ID NO:53), HUMPHOSLIP_PEA_{—}2_T18 (SEQ ID NO:55) and HUMPHOSLIP_PEA_{—}2_T19 (SEQ ID NO:56). Table 41 below describes the starting and ending position of this segment on each transcript.

[1972] Segment cluster HUMPHOSLIP_PEA_{—}2_node_{—}17 (SEQ ID NO:382) according to the present invention can be found in the following transcript(s): HUMPHOSLIP_PEA_{—}2_T6 (SEQ ID NO:50), HUMPHOSLIP_PEA_{—}2_T7 (SEQ ID NO:51), HUMPHOSLIP_PEA_{—}2_T14 (SEQ ID NO:52), HUMPHOSLIP_PEA_{—}2_T16 (SEQ ID NO:53), HUMPHOSLIP_PEA_{—}2_T18 (SEQ ID NO:55) and HUMPHOSLIP_PEA_{—}2_T19 (SEQ ID NO:56). Table 42 below describes the starting and ending position of this segment on each transcript.

[1973] Segment cluster HUMPHOSLIP_PEA_{—}2_node_{—}23 (SEQ ID NO:383) according to the present invention is supported by 168 libraries. The number of libraries was determined as previously described. This segment can be found in the following transcript(s): HUMPHOSLIP_PEA_{—}2_T6 (SEQ ID NO:50, HUMPHOSLIP_PEA_{—}2_T7 (SEQ ID NO:51), HUMPHOSLIP_PEA_{—}2_T14 (SEQ ID NO:52), HUMPHOSLIP_PEA_{—}2_T16 (SEQ ID NO:53), HUMPHOSLIP_PEA_{—}2_T17 (SEQ ID NO:54), HUMPHOSLIP_PEA_{—}2_T18 (SEQ ID NO:55) and HUMPHOSLIP_PEA_{—}2_T19 (SEQ ID NO:56). Table 43 below describes the starting and ending position of this segment on each transcript.

[1974] Segment cluster HUMPHOSLIP_PEA_{—}2_node_{—}24 (SEQ ID NO:384) according to the present invention can be found in the following transcript(s): HUMPHOSLIP_PEA_{—}2_T6 (SEQ ID NO:50), HUMPHOSLIP_PEA_{—}2_T7 (SEQ ID NO:51, HUMPHOSLIP_PEA_{—}2_T14 (SEQ ID NO:52), HUMPHOSLIP_PEA_{—}2_T16 (SEQ ID NO:53), HUMPHOSLIP_PEA_{—}2_T17 (SEQ ID NO:54), HUMPHOSLIP_PEA_{—}2_T18 (SEQ ID NO:55) and HUMPHOSLIP_PEA_{—}2_T19 (SEQ ID NO:56) Table 44 below describes the starting and ending position of this segment on each transcript.

[1975] Segment cluster HUMPHOSLIP_PEA_{—}2_node_{—}25 (SEQ ID NO:385) according to the present invention is supported by 5 libraries. The number of libraries was determined as previously described. This segment can be found in the following transcript(s): HUMPHOSLIP_PEA_{—}2_T14 (SEQ ID NO:52) and HUMPHOSLIP_PEA_{—}2_T18 (SEQ ID NO:55). Table 45 below describes the starting and ending position of this segment on each transcript.

[1976] Segment cluster HUMPHOSLIP_PEA_{—}2_node_{—}26 (SEQ ID NO:386) according to the present invention is supported by 163 libraries. The number of libraries was determined as previously described. This segment can be found in the following transcript(s): HUMPHOSLIP_PEA_{—}2_T6 (SEQ ID NO:50), HUMPHOSLIP_PEA_{—}2_T7 (SEQ ID NO:51), HUMPHOSLIP_PEA_{—}2_T14 (SEQ ID NO:521, HUMPHOSLIP_PEA_{—}2_T16 (SEQ ID NO:53), HUMPHOSLIP_PEA_{—}2_T17 (SEQ ID NO:54), HUMPHOSLIP_PEA_{—}2_T18 (SEQ ID NO:55) and HUMPHOSLIP_PEA_{—}2_T19 (SEQ ID NO:56). Table 46 below describes the starting and ending position of this segment on each transcript.

[1977] Segment cluster HUMPHOSLIP_PEA_{—}2_node_{—}29 (SEQ ID NO:387) according to the present invention can be found in the following transcript(s): HUMPHOSLIP_PEA_{—}2_T6 (SEQ ID NO:50), HUMPHOSLIP_PEA_{—}2_T7 (SEQ ID NO:51), HUMPHOSLIP_PEA_{—}2_T14 (SEQ ID NO:52), HUMPHOSLIP_PEA_{—}2_T17 (SEQ ID NO:54), HUMPHOSLIP_PEA_{—}2_T18 (SEQ ID NO:55) and HUMPHOSLIP_PEA_{—}2_T19 (SEQ ID NO:56). Table 47 below describes the starting and ending position of this segment on each transcript.

[1978] Segment cluster HUMPHOSLIP_PEA_{—}2_node_{—}30 (SEQ ID NO:388) according to the present invention is supported by 181 libraries. The number of libraries was determined as previously described. This segment can be found in the following transcript(s): HUMPHOSLIP_PEA_{—}2_T6 (SEQ ID NO:50), HUMPHOSLIP_PEA_{—}2_T7 (SEQ ID NO:51), HUMPHOSLIP_PEA_{—}2_T14 (SEQ ID NO:52), HUMPHOSLIP_PEA_{—}2_T16 (SEQ ID NO:53) HUMPHOSLIP_PEA_{—}2_T17 (SEQ ID NO:54), HUMPHOSLIP_PEA_{—}2_T18 (SEQ ID NO:55) and HUMPHOSLIP_PEA_{—}2_T19 (SEQ ID NO:56). Table 48 below describes the starting and ending position of this segment on each transcript.

[1979] Segment cluster HUMPHOSLIP_PEA_{—}2_node_{—}33 (SEQ ID NO:389) according to the present invention is supported by 173 libraries. The number of libraries was determined as previously described. This segment can be found in the following transcript(s): HUMPHOSLIP_PEA_{—}2_T6 (SEQ ID NO:50), HUMPHOSLIP_PEA_{—}2_T7 (SEQ ID NO:51), HUMPHOSLIP_PEA_{—}2_T14 (SEQ ID NO 52), HUMPHOSLIP_PEA_{—}2_T16 (SEQ ID NO:53), HUMPHOSLIP_PEA_{—}2_T17 (SEQ ID NO:54), HUMPHOSLIP_PEA_{—}2_T18 (SEQ ID NO:55) and HUMPHOSLIP_PEA_{—}2_T19 (SEQ ID NO:56). Table 49 below describes the starting and ending position of this segment on each transcript.

[1980] Segment cluster HUMPHOSLIP_PEA_{—}2_node_{—}36 (SEQ ID NO:390) according to the present invention is supported by 163 libraries. The number of libraries was determined as previously described. This segment can be found in the following transcript(s): HUMPHOSLIP_PEA_{—}2_T6 (SEQ ID NO:50), HUMPHOSLIP_PEA_{—}2_T7 (SEQ ID NO:51, HUMPHOSLIP_PEA_{—}2_T14 (SEQ ID NO:52), HUMPHOSLIP_PEA_{—}2_T16 (SEQ ID NO:53), HUMPHOSLIP_PEA_{—}2_T17 (SEQ ID NO:54), HUMPHOSLIP_PEA_{—}2_T18 (SEQ ID NO:55) and HUMPHOSLIP_PEA_{—}2_T19 (SEQ ID NO:56). Table 50 below describes the starting and ending position of this segment on each transcript.

[1981] Segment cluster HUMPHOSLIP_PEA_{—}2_node_{—}37 (SEQ ID NO:391) according to the present invention can be found in the following transcript(s): HUMPHOSLIP_PEA_{—}2_T6 (SEQ ID NO:50), HUMPHOSLIP_PEA_{—}2_T7 (SEQ ID NO:1, HUMPHOSLIP_PEA_{—}2_T14 (SEQ ID NO:52), HUMPHOSLIP_PEA_{—}2_T16 (SEQ ID NO:53), HUMPHOSLIP_PEA_{—}2_T17 (SEQ ID NO:54), HUMPHOSLIP_PEA_{—}2_T18 (SEQ ID NO:55) and HUMPHOSLIP_PEA_{—}2_T19 (SEQ ID NO:56). Table 51 below describes the starting and ending position of this segment on each transcript.

[1982] Segment cluster HUMPHOSLIP_PEA_{—}2_node_{—}39 (SEQ ID NO:392) according to the present invention is supported by 166 libraries. The number of libraries was determined as previously described. This segment can be found in the following transcript(s): HUMPHOSLIP_PEA_{—}2_T6 (SEQ ID NO:50), HUMPHOSLIP_PEA_{—}2_T7 (SEQ ID NO:51), HUMPHOSLIP_PEA_{—}2_T14 (SEQ ID NO:52), HUMPHOSLIP_PEA_{—}2_T16 (SEQ ID NO:53), HUMPHOSLIP_PEA_{—}2_T17 (SEQ ID NO:54), HUMPHOSLIP_PEA_{—}2_T18 (SEQ ID NO:55) and HUMPHOSLIP_PEA_{—}2_T19 (SEQ ID NO:56). Table 52 below describes the starting and ending position of this segment on each transcript.

[1983] Segment cluster HUMPHOSLIP_PEA_{—}2_node_{—}40 (SEQ ID NO:393) according to the present invention is supported by 199 libraries. The number of libraries was determined as previously described. This segment can be found in the following transcript(s): HUMPHOSLIP_PEA_{—}2_T6 (SEQ ID NO:50, HUMPHOSLIP_PEA_{—}2_T7 (SEQ ID NO:51), HUMPHOSLIP_PEA_{—}2_T14 (SEQ ID NO:52), HUMPHOSLIP_PEA_{—}2_T16 (SEQ ID NO:53) HUMPHOSLIP_PEA_{—}2_T17 (SEQ ID NO:54), HUMPHOSLIP_PEA_{—}2_T18 (SEQ ID NO:55) and HUMPHOSLIP_PEA_{—}2_T19 (SEQ ID NO:56). Table 53 below describes the starting and ending position of this segment on each transcript.

[1984] Segment cluster HUMPHOSLIP_PEA_{—}2_node_{—}41 (SEQ ID NO:394) according to the present invention is supported by 186 libraries. The number of libraries was determined as previously described. This segment can be found in the following transcript(s): HUMPHOSLIP_PEA_{—}2_T6 (SEQ ID NO:50), HUMPHOSLIP_PEA_{—}2_T7 (SEQ ID NO:51), HUMPHOSLIP_PEA_{—}2_T14 (SEQ ID NO:52), HUMPHOSLIP_PEA_{—}2_T16 (SEQ ID NO:53), HUMPHOSLIP_PEA_{—}2_T17 (SEQ ID NO:54), HUMPHOSLIP_PEA_{—}2_T18 (SEQ ID NO:55) and HUMPHOSLIP_PEA_{—}2_T19 (SEQ ID NO:56). Table 54 below describes the starting and ending position of this segment on each transcript.

[1985] Segment cluster HUMPHOSLIP_PEA_{—}2_node_{—}42 (SEQ ID NO:395) according to the present invention can be found in the following transcript(s): HUMPHOSLIP_PEA_{—}2_T6 (SEQ ID NO:52), HUMPHOSLIP_PEA_{—}2_T7 (SEQ ID NO:51), HUMPHOSLIP_PEA_{—}2_T14 (SEQ ID NO:52), HUMPHOSLIP_PEA_{—}2_T16 (SEQ ID NO:53), HUMPHOSLIP_PEA_{—}2_T17 (SEQ ID NO:54), HUMPHOSLIP_PEA_{—}2_T18 (SEQ ID NO:55) and HUMPHOSLIP_PEA_{—}2_T19 (SEQ ID NO:56). Table 55 below describes the starting and ending position of this segment on each transcript.

[1986] Segment cluster HUMPHOSLIP_PEA_{—}2_node_{—}44 (SEQ ID NO:396) according to the present invention is supported by 185 libraries. The number of libraries was determined as previously described. This segment can be found in the following transcript(s): HUMPHOSLIP_PEA_{—}2_T6 (SEQ ID NO:50), HUMPHOSLIP_PEA_{—}2_T7 (SEQ ID NO:51), HUMPHOSLIP_PEA_{—}2_T14 (SEQ ID NO:52), HUMPHOSLIP_PEA_{—}2_T16 (SEQ ID NO:53), HUMPHOSLIP_PEA_{—}2_T17 (SEQ ID NO:54), HUMPHOSLIP_PEA_{—}2_T18 (SEQ ID NO:55) and HUMPHOSLIP_PEA_{—}2_T19 (SEQ ID NO:56). Table 56 below describes the starting and ending position of this segment on each transcript.

[1987] Segment cluster HUMPHOSLIP_PEA_{—}2_node_{—}45 (SEQ ID NO:397) according to the present invention is supported by 197 libraries. The number of libraries was determined as previously described. This segment can be found in the following transcript(s): HUMPHOSLIP_PEA_{—}2_T6 (SEQ ID NO:50), HUMPHOSLIP_PEA_{—}2_T7 (SEQ ID NO:51), HUMPHOSLIP_PEA_{—}2_T14 (SEQ ID NO:52), HUMPHOSLIP_PEA_{—}2_T16 (SEQ ID NO:53), HUMPHOSLIP_PEA_{—}2_T17 (SEQ ID NO:54), HUMPHOSLIP_PEA_{—}2_T18 (SEQ ID NO:55) and HUMPHOSLIP_PEA_{—}2_T19 (SEQ ID NO:56). Table 57 below describes the starting and ending position of this segment on each transcript.

[1988] Segment cluster HUMPHOSLIP_PEA_{—}2_node_{—}47 (SEQ ID NO:398) according to the present invention is supported by 223 libraries. The number of libraries was determined as previously described. This segment can be found in the following transcript(s): HUMPHOSLIP_PEA_{—}2_T6 (SEQ ID NO:50), HUMPHOSLIP_PEA_{—}2_T7 (SEQ ID NO:51), HUMPHOSLIP_PEA_{—}2_T14 (SEQ ID NO:52), HUMPHOSLIP_PEA_{—}2_T16 (SEQ ID NO:53) HUMPHOSLIP_PEA_{—}2_T17 (SEQ ID NO:54), HUMPHOSLIP_PEA_{—}2_T18 (SEQ ID NO:55) and HUMPHOSLIP_PEA_{—}2_T19 (SEQ ID NO:56). Table 58 below describes the starting and ending position of this segment on each transcript.

[1989] Segment cluster HUMPHOSLIP_PEA_{—}2_node_{—}51 (SEQ ID NO:399) according to the present invention can be found in the following transcript(s): HUMPHOSLIP_PEA_{—}2_T6 (SEQ ID NO:50), HUMPHOSLIP_PEA_{—}2_T7 (SEQ ID NO:51), HUMPHOSLIP_PEA_{—}2_T14 (SEQ ID NO:52), HUMPHOSLIP_PEA_{—}2_T16 (SEQ ID NO:53), HUMPHOSLIP_PEA_{—}2_T17 (SEQ ID NO:54), HUMPHOSLIP_PEA_{—}2_T18 (SEQ ID NO:55) and HUMPHOSLIP_PEA_{—}2_T19 (SEQ ID NO:56). Table 59 below describes the starting and ending position of this segment on each transcript.

[1990] Segment cluster HUMPHOSLIP_PEA_{—}2_node_{—}52 (SEQ ID NO:400) according to the present invention is supported by 235 libraries. The number of libraries was determined as previously described. This segment can be found in the following transcript(s): HUMPHOSLIP_PEA_{—}2_T6 (SEQ ID NO:50), HUMPHOSLIP_PEA_{—}2_T7 (SEQ ID NO:51), HUMPHOSLIP_PEA_{—}2_T14 (SEQ ID NO:52), HUMPHOSLIP_PEA_{—}2_T16 (SEQ ID NO:53), HUMPHOSLIP_PEA_{—}2_T17 (SEQ ID NO:54), HUMPHOSLIP_PEA_{—}2_T18 (SEQ ID NO:55) and HUMPHOSLIP_PEA_{—}2_T19 (SEQ ID NO:56). Table 60 below describes the starting and ending position of this segment on each transcript.

[1991] Segment cluster HUMPHOSLIP_PEA_{—}2_node_{—}53 (SEQ ID NO:401) according to the present invention is supported by 5 libraries. The number of libraries was determined as previously described. This segment can be found in the following transcript(s): HUMPHOSLIP_PEA_{—}2_T19 (SEQ ID NO:56). Table 61 below describes the starting and ending position of this segment on each transcript.

[1992] Segment cluster HUMPHOSLIP_PEA_{—}2_node_{—}54 (SEQ ID NO:402) according to the present invention is supported by 236 libraries. The number of libraries was determined as previously described. This segment can be found in the following transcript(s): HUMPHOSLIP_PEA_{—}2_T6 (SEQ ID NO:50), HUMPHOSLIP_PEA_{—}2_T7 (SEQ ID NO:51), HUMPHOSLIP_PEA_{—}2_T14 (SEQ ID NO:52, HUMPHOSLIP_PEA_{—}2_T16 (SEQ ID NO:53), HUMPHOSLIP_PEA_{—}2_T17 (SEQ ID NO:54), HUMPHOSLIP_PEA_{—}2_T18 (SEQ ID NO:55) and HUMPHOSLIP_PEA_{—}2_T19 (SEQ ID NO:56). Table 62 below describes the starting and ending position of this segment on each transcript.

[1993] Segment cluster HUMPHOSLIP_PEA_{—}2_node_{—}55 (SEQ ID NO:403) according to the present invention is supported by 232 libraries. The number of libraries was determined as previously described. This segment can be found in the following transcript(s): HUMPHOSLIP_PEA_{—}2_T6 (SEQ ID NO:50, HUMPHOSLIP_PEA_{—}2_T7 (SEQ ID NO:51), HUMPHOSLIP_PEA_{—}2_T14 (SEQ ID NO:52), HUMPHOSLIP_PEA_{—}2_T16 (SEQ ID NO:53), HUMPHOSLIP_PEA_{—}2_T17 (SEQ ID NO:54), HUMPHOSLIP_PEA_{—}2_T18 (SEQ ID NO:55) and HUMPHOSLIP_PEA_{—}2_T19 (SEQ ID NO:56). Table 63 below describes the starting and ending position of this segment on each transcript.

[1994] Segment cluster HUMPHOSLIP_PEA_{—}2_node_{—}58 (SEQ ID NO:404) according to the present invention can be found in the following transcript(s): HUMPHOSLIP_PEA_{—}2_T6 (SEQ ID NO:50), HUMPHOSLIP_PEA_{—}2_T7 (SEQ ID NO:51), HUMPHOSLIP_PEA_{—}2_T14 (SEQ ID NO:52), HUMPHOSLIP_PEA_{—}2_T16 (SEQ ID NO:53), HUMPHOSLIP_PEA_{—}2_T17 (SEQ ID NO:54), HUMPHOSLIP_PEA_{—}2_T18 (SEQ ID NO:55) and HUMPHOSLIP_PEA_{—}2_T19 (SEQ ID NO:56) Table 64 below describes the starting and ending position of this segment on each transcript.

[1995] Segment cluster HUMPHOSLIP_PEA_{—}2_node_{—}59 (SEQ ID NO:405) according to the present invention is supported by 230 libraries. The number of libraries was determined as previously described. This segment can be found in the following transcript(s): HUMPHOSLIP_PEA_{—}2_T6 (SEQ ID NO:50), HUMPHOSLIP_PEA_{—}2_T7 (SEQ ID NO:51), HUMPHOSLIP_PEA_{—}2_T14 (SEQ ID NO:52), HUMPHOSLIP_PEA_{—}2_T16 (SEQ ID NO:53) HUMPHOSLIP_PEA_{—}2_T17 (SEQ ID NO:54), HUMPHOSLIP_PEA_{—}2_T18 (SEQ ID NO:55) and HUMPHOSLIP_PEA_{—}2_T19 (SEQ ID NO:56). Table 65 below describes the starting and ending position of this segment on each transcript.

[1996] Segment cluster HUMPHOSLIP_PEA_{—}2_node_{—}60 (SEQ ID NO:406) according to the present invention can be found in the following transcript(s): HUMPHOSLIP_PEA_{—}2_T6 (SEQ ID NO:50), HUMPHOSLIP_PEA_{—}2_T7 (SEQ ID NO:51, HUMPHOSLIP_PEA_{—}2_T14 (SEQ ID NO:52), HUMPHOSLIP_PEA_{—}2_T16 (SEQ ID NO:53), HUMPHOSLIP_PEA_{—}2_T17 (SEQ ID NO:54), HUMPHOSLIP_PEA_{—}2_T18 (SEQ ID NO:55) and HUMPHOSLIP_PEA_{—}2_T19 (SEQ ID NO:56). Table 66 below describes the starting and ending position of this segment on each transcript.

[1997] Segment cluster HUMPHOSLIP_PEA_{—}2_node_{—}61 (SEQ ID NO:407) according to the present invention can be found in the following transcript(s): HUMPHOSLIP_PEA_{—}2_T6 (SEQ ID NO:50), HUMPHOSLIP_PEA_{—}2_T7 (SEQ ID NO:51), HUMPHOSLIP_PEA_{—}2_T14 (SEQ ID NO:52), HUMPHOSLIP_PEA_{—}2_T16 (SEQ ID NO:53), HUMPHOSLIP_PEA_{—}2_T17 (SEQ ID NO:54), HUMPHOSLIP_PEA_{—}2_T18 (SEQ ID NO:55) and HUMPHOSLIP_PEA_{—}2_T19 (SEQ ID NO:56) Table 67 below describes the starting and ending position of this segment on each transcript.

[1998] Segment cluster HUMPHOSLIP_PEA_{—}2_node_{—}62 (SEQ ID NO:408) according to the present invention can be found in the following transcript(s): HUMPHOSLIP_PEA_{—}2_T6 (SEQ ID NO:50), HUMPHOSLIP_PEA_{—}2_T7 (SEQ ID NO:51, HUMPHOSLIP_PEA_{—}2_T14 (SEQ ID NO:52), HUMPHOSLIP_PEA_{—}2_T16 (SEQ ID NO:53), HUMPHOSLIP_PEA_{—}2_T17 (SEQ ID NO:54), HUMPHOSLIP_PEA_{—}2_T18 (SEQ ID NO:55) and HUMPHOSLIP_PEA_{—}2_T19 (SEQ ID NO:56). Table 68 below describes the starting and ending position of this segment on each transcript.

[1999] Segment cluster HUMPHOSLIP_PEA_{—}2_node_{—}63 (SEQ ID NO:409) according to the present invention can be found in the following transcript(s): HUMPHOSLIP_PEA_{—}2_T6 (SEQ ID NO:50), HUMPHOSLIP_PEA_{—}2_T7 (SEQ ID NO:51), HUMPHOSLIP_PEA_{—}2_T14 (SEQ ID NO:52), HUMPHOSLIP_PEA_{—}2_T16 (SEQ ID NO:53), HUMPHOSLIP_PEA_{—}2_T17 (SEQ ID NO:54), HUMPHOSLIP_PEA_{—}2_T18 (SEQ ID NO:55) and HUMPHOSLIP_PEA_{—}2_T19 (SEQ ID NO:56). Table 69 below describes the starting and ending position of this segment on each transcript.

[2000] Segment cluster HUMPHOSLIP_PEA_{—}2_node_{—}64 (SEQ ID NO:410) according to the present invention can be found in the following transcript(s): HUMPHOSLIP_PEA_{—}2_T6 (SEQ ID NO:50), HUMPHOSLIP_PEA_{—}2_T7 (SEQ ID NO:51), HUMPHOSLIP_PEA_{—}2_T14 (SEQ ID NO:52), HUMPHOSLIP_PEA_{—}2_T16 (SEQ ID NO:53), HUMPHOSLIP_PEA_{—}2_T17 (SEQ ID NO:54), HUMPHOSLIP_PEA_{—}2_T18 (SEQ ID NO:55) and HUMPHOSLIP_PEA_{—}2_T19 (SEQ ID NO:56). Table 70 below describes the starting and ending position of this segment on each transcript.

[2001] Segment cluster HUMPHOSLIP_PEA_{—}2_node_{—}65 (SEQ ID NO:411) according to the present invention can be found in the following transcript(s): HUMPHOSLIP_PEA_{—}2_T6 (SEQ ID NO:50), HUMPHOSLIP_PEA_{—}2_T7 (SEQ ID NO:51), HUMPHOSLIP_PEA_{—}2_T14 (SEQ ID NO:52), HUMPHOSLIP_PEA_{—}2_T16 (SEQ ID NO:53), HUMPHOSLIP_PEA_{—}2_T17 (SEQ ID NO:54), HUMPHOSLIP_PEA_{—}2_T18 (SEQ ID NO:55) and HUMPHOSLIP_PEA_{—}2_T19 (SEQ ID NO:56). Table 71 below describes the starting and ending position of this segment on each transcript.

[2002] Segment cluster HUMPHOSLIP_PEA_{—}2_node_{—}66 (SEQ ID NO:412) according to the present invention is supported by 180 libraries. The number of libraries was determined as previously described. This segment can be found in the following transcript(s): HUMPHOSLIP_PEA_{—}2_T6 (SEQ ID NO:50), HUMPHOSLIP_PEA_{—}2_T7 (SEQ ID NO:51), HUMPHOSLIP_PEA_{—}2_T14 (SEQ ID NO:52), HUMPHOSLIP_PEA_{—}2_T16 (SEQ ID NO:53), HUMPHOSLIP_PEA_{—}2_T17 (SEQ ID NO:54), HUMPHOSLIP_PEA_{—}2_T18 (SEQ ID NO:55) and HUMPHOSLIP_PEA_{—}2_T19 (SEQ ID NO:56). Table 72 below describes the starting and ending position of this segment on each transcript.

[2003] Segment cluster HUMPHOSLIP_PEA_{—}2_node_{—}67 (SEQ ID NO:413) according to the present invention can be found in the following transcript(s): HUMPHOSLIP_PEA_{—}2_T6 (SEQ ID NO:50), HUMPHOSLIP_PEA_{—}2_T7 (SEQ ID NO:51, HUMPHOSLIP_PEA_{—}2_T14 (SEQ ID NO:52), HUMPHOSLIP_PEA_{—}2_T16 (SEQ ID NO:53), HUMPHOSLIP_PEA_{—}2_T17 (SEQ ID NO:54), HUMPHOSLIP_PEA_{—}2_T18 (SEQ ID NO:55) and HUMPHOSLIP_PEA_{—}2_T19 (SEQ ID NO:56) Table 73 below describes the starting and ending position of this segment on each transcript.

[2004] Segment cluster HUMPHOSLIP_PEA_{—}2_node_{—}69 (SEQ ID NO:414) according to the present invention can be found in the following transcript(s): HUMPHOSLIP_PEA_{—}2_T6 (SEQ ID NO:50), HUMPHOSLIP_PEA_{—}2_T7 (SEQ ID NO:51), HUMPHOSLIP_PEA_{—}2_T14 (SEQ ID NO:52), HUMPHOSLIP_PEA_{—}2_T16 (SEQ ID NO:53), HUMPHOSLIP_PEA_{—}2_T17 (SEQ ID NO:54), HUMPHOSLIP_PEA_{—}2_T18 (SEQ ID NO:55) and HUMPHOSLIP_PEA_{—}2_T19 (SEQ ID NO:56). Table 74 below describes the starting and ending position of this segment on each transcript.

[2005] Segment cluster HUMPHOSLIP_PEA_{—}2_node_{—}71 (SEQ ID NO:415) according to the present invention can be found in the following transcript(s): HUMPHOSLIP_PEA_{—}2_T6 (SEQ ID NO:50), HUMPHOSLIP_PEA_{—}2_T7 (SEQ ID NO:51), HUMPHOSLIP_PEA_{—}2_T14 (SEQ ID NO:52), HUMPHOSLIP_PEA_{—}2_T16 (SEQ ID NO:53), HUMPHOSLIP_PEA_{—}2_T17 (SEQ ID NO:54), HUMPHOSLIP_PEA_{—}2_T18 (SEQ ID NO:55) and HUMPHOSLIP_PEA_{—}2_T19 (SEQ ID NO:56) Table 75 below describes the starting and ending position of this segment on each transcript.

[2006] Segment cluster HUMPHOSLIP_PEA_{—}2_node_{—}72 (SEQ ID NO:416) according to the present invention is supported by 7 libraries. The number of libraries was determined as previously described. This segment can be found in the following transcript(s): HUMPHOSLIP_PEA_{—}2_T6 (SEQ ID NO:50), HUMPHOSLIP_PEA_{—}2_T7 (SEQ ID NO:51), HUMPHOSLIP_PEA_{—}2_T14 (SEQ ID NO:52), HUMPHOSLIP_PEA_{—}2_T16 (SEQ ID NO:53), HUMPHOSLIP_PEA_{—}2_T17 (SEQ ID NO:54), HUMPHOSLIP_PEA_{—}2_T18 (SEQ ID NO:55) and HUMPHOSLIP_PEA_{—}2_T19 (SEQ ID NO:56). Table 76 below describes the starting and ending position of this segment on each transcript.

[2007] Segment cluster HUMPHOSLIP_PEA_{—}2_node_{—}73 (SEQ ID NO:417) according to the present invention is supported by 5 libraries. The number of libraries was determined as previously described. This segment can be found in the following transcript(s): HUMPHOSLIP_PEA_{—}2_T6 (SEQ ID NO:50), HUMPHOSLIP_PEA_{—}2_T7 (SEQ ID NO:51), HUMPHOSLIP_PEA_{—}2_T14 (SEQ ID NO:52), HUMPHOSLIP_PEA_{—}2_T16 (SEQ ID NO:53), HUMPHOSLIP_PEA_{—}2_T17 (SEQ ID NO:54), HUMPHOSLIP_PEA_{—}2_T18 (SEQ ID NO:55) and HUMPHOSLIP_PEA_{—}2_T19 (SEQ ID NO:56). Table 77 below describes the starting and ending position of this segment on each transcript.

[2008] Segment cluster HUMPHOSLIP_PEA_{—}2_node_{—}74 (SEQ ID NO:418) according to the present invention is supported by 10 libraries. The number of libraries was determined as previously described. This segment can be found in the following transcript(s): HUMPHOSLIP_PEA_{—}2_T6 (SEQ ID NO:50, HUMPHOSLIP_PEA_{—}2_T7 (SEQ ID NO:51), HUMPHOSLIP_PEA_{—}2_T14 (SEQ ID NO:52), HUMPHOSLIP_PEA_{—}2_T16 (SEQ ID NO:53), HUMPHOSLIP_PEA_{—}2_T17 (SEQ ID NO:54), HUMPHOSLIP_PEA_{—}2_T18 (SEQ ID NO:55) and HUMPHOSLIP_PEA_{—}2_T19 (SEQ ID NO:56). Table 78 below describes the starting and ending position of this segment on each transcript.

Variant protein alignment to the previously known protein:

Sequence name: PLTP_HUMAN (SEQ ID NO:636)

Sequence Documentation:

Alignment of: HUMPHOSLIP_PEA_{—}2_P10 (SEQ ID NO:581)×PLTP_HUMAN (SEQ ID NO:636) ••

Alignment segment 1/1:

Alignment:

Sequence name: PLTP_HUMAN (SEQ ID NO:636)

Sequence Documentation:

Alignment of: HUMPHOSLIP_PEA_{—}2_P12 (SEQ ID NO:582)×PLTP_HUMAN (SEQ ID NO:636) ••

Alignment segment 1/1:

Alignment:

Sequence name: PLTP_HUMAN (SEQ ID NO:636)

Sequence Documentation:

Alignment of: HUMPHOSLIP_PEA_{—}2_P31 (SEQ ID NO:584)×PLTP_HUMAN (SEQ ID NO:636) ••

Alignment segment 1/1:

Alignment:

Sequence name: PLTP_HUMAN (SEQ ID NO:636)

Sequence Documentation:

Alignment of: HUMPHOSLIP_PEA_{—}2_P33 (SEQ ID NO:585)×PLTP_HUMAN (SEQ ID NO:636) ••

Alignment segment 1/1:

Alignment:

Sequence name: PLTP_HUMAN (SEQ ID NO:636)

Sequence Documentation:

Alignment of: HUMPHOSLIP_PEA_{—}2_P34 (SEQ ID NO:586)×PLTP_HUMAN (SEQ ID NO:636) ••

Alignment segment 1/1:

Alignment:

Sequence name: PLTP_HUMAN (SEQ ID NO:636)

Sequence Documentation:

Alignment of: HUMPHOSLIP_PEA_{—}2_P35 (SEQ ID NO:587)×PLTP_HUMAN (SEQ ID NO:636) ••

Alignment segment 1/1:

Alignment:

Description for Cluster D11853

[2009] Cluster D11853 features 18 transcript(s) and 31 segment(s) of interest, the names for which are given in Tables 1 and 2, respectively, the sequences themselves are given at the end of the application. The selected protein variants are given in table 3.

[2010] These sequences are variants of the known protein Membrane associated protein SLP-2 (SwissProt accession identifier Q9UJZ1; known also according to the synonyms Stomatin-like protein 2; Stomatin-like 2; Hypothetical protein FLJ14499), SEQ ID NO: 637, referred to herein as the previously known protein.

[2011] The sequence for protein Membrane associated protein SLP-2 (SEQ ID NO:637) is given at the end of the application, as “Membrane associated protein SLP-2 amino acid sequence”.

[2012] The following GO Annotation(s) apply to the previously known protein. The following annotation(s) were found: ligand, which are annotation(s) related to Molecular Function; and cytoskeleton; membrane, which are annotation(s) related to Cellular Component.

[2013] The GO assignment relies on information from one or more of the SwissProt/TremB1 Protein knowledgebase, available from <http://www.expasy.ch/sprot/>; or Locuslink, available from <http://www.ncbi.nlm.nih.gov/projects/LocusLink/>.

[2014] Cluster D11853 can be used as a diagnostic marker according to overexpression of transcripts of this cluster in cancer. Expression of such transcripts in normal tissues is also given according to the previously described methods. The term “number” in the left hand column of the table and the numbers on the y-axis of the figure below refer to weighted expression of ESTs in each category, as “parts per million” (ratio of the expression of ESTs for a particular cluster to the expression of all ESTs in that category, according to parts per million).

[2015] Overall, the following results were obtained as shown with regard to the histograms in FIG. 26 and Table 4. This cluster is overexpressed (at least at a minimum level) in the following pathological conditions: brain malignant tumors, colorectal cancer and a mixture of malignant tumors from different tissues.

[2016] As noted above, cluster D11853 features 18 transcript(s), which were listed in Table 1 above. These transcript(s) encode for protein(s) which are variant(s) of protein Membrane associated protein SLP-2 (SEQ ID NO:637). A description of each variant protein according to the present invention is now provided.

[2017] Variant protein D11853_PEA_{—}1_P1 (SEQ ID NO:588) according to the present invention has an amino acid sequence as given at the end of the application; it is encoded by transcript(s) D11853_PEA_{—}1_T1 (SEQ ID NO:57). An alignment is given to the known protein (Membrane associated protein SLP-2 (SEQ ID NO:637)) at the end of the application. One or more alignments to one or more previously published protein sequences are given at the end of the application. A brief description of the relationship of the variant protein according to the present invention to each such aligned protein is as follows:

[2018] Comparison report between D11853_PEA_{—}1_P1 (SEQ ID NO:588) and Q9P₀₄₂ (SEQ ID NO 639):

[2019] 1. An isolated chimeric polypeptide encoding for D11853_PEA_{—}1_P1 (SEQ ID NO:588), comprising a first amino acid sequence being at least 70%, optionally at least 80%, preferably at least 85%, more preferably at least 90% and most preferably at least 95% homologous to a polypeptide having the sequence MLARAARGTGALLLRGSLLASGRAPR (SEQ ID NO:1530) corresponding to amino acids 1-26 of D11853_PEA_{—}1_P1 (SEQ ID NO:588), a second amino acid sequence being at least 90% homologous to RASSGLPRNTVVLFVPQQEAWVVERMGRFHRILEPGLNILIPVLDRIRYVQSLKEIVINVP EQSAVTLDNVTLQIDGVLYLRIMDPYKASYGVEDPEYAVTQLAQTTMRSELGKLSLDK VFRERESLNASIVDAINQAADCWGIRCLRYEIKDIHVPPRVKESMQMQVEAERRKR corresponding to amino acids 13-187 of Q9P₀₄₂ (SEQ ID NO:639), which also corresponds to amino acids 27-201 of D11853_PEA_{—}1_P1 (SEQ ID NO:588), a bridging amino acid A corresponding to amino acid 202 of D11853_PEA_{—}1_P1 (SEQ ID NO:588), and a third amino acid sequence being at least 90% homologous to TVLESEGTRESAINVAEGKKQAQILASEAEKAEQINQAAGEASAVLAKAKAKAEAIRIL AAALTQHNGDAAASLTVAEQYVSAFSKLAKDSNTILLPSNPGDVTSMVAQAMGVYGA LTKAPVPGTPDSLSSGSSRDVQGTDASLDEELDRVKMS corresponding to amino acids 189-342 of Q9P₀₄₂ (SEQ ID NO:639), which also corresponds to amino acids 203-356 of D11853_PEA_{—}1_P1 (SEQ ID NO:588), wherein said first amino acid sequence, second amino acid sequence, bridging amino acid and third amino acid sequence are contiguous and in a sequential order.

[2020] 2. An isolated polypeptide encoding for a head of D11853_PEA_{—}1_P1 (SEQ ID NO:588), comprising a polypeptide being at least 70%, optionally at least about 80%, preferably at least about 85%, more preferably at least about 90% and most preferably at least about 95% homologous to the sequence MLARAARGTGALLLRGSLLASGRAPR (SEQ ID NO:1530) of D11853_PEA_{—}1_P1 (SEQ ID NO:588).

[2021] Comparison report between D11853_PEA_{—}1_P1 (SEQ ID NO:588) and BAC85377 (SEQ ID NO 640):

[2022] 1. An isolated chimeric polypeptide encoding for D11853_PEA_{—}1_P1 (SEQ ID NO:588), comprising a first amino acid sequence being at least 70%, optionally at least 80%, preferably at least 85%, more preferably at least 90% and most preferably at least 95% homologous to a polypeptide having the sequence MLARAARGTGALLLRGSLLASGRAPRRASSGLPRNTVVLFVPQQEAWVVERMGRFHRI LEPGLNILIPVLDRIRYVQSLKEIVINVPEQSAVTLDNVTLQIDGVLYLRI corresponding to amino acids 1-109 of D11853_PEA_{—}1_P1 (SEQ ID NO:588), a second amino acid sequence being at least 90% homologous to MDPYKASYGVEDPEYAVTQLAQTTMRSELGKLSLDKVFRERESLNASIVDAINQAADC WGIRCLRYEIKDIHVPPRVKESMQMQVEAERRKRATVLESEGTRESAINVAEGKKQAQI LASEAEKAEQINQAAGEASAVLAKAKAKAEAIRILAAALTQH corresponding to amino acids 1-159 of BAC85377 (SEQ ID NO:640), which also corresponds to amino acids 110-268 of D11853_PEA_{—}1_P1 (SEQ ID NO:588), and a third amino acid sequence being at least 70%, optionally at least 80%, preferably at least 85%, more preferably at least 90% and most preferably at least 95% homologous to a polypeptide having the sequence NGDAAASLTVAEQYVSAFSKLAKDSNTILLPSNPGDVTSMVAQAMGVYGALTKAPVP GTPDSLSSGSSRDVQGTDASLDEELDRVKMS corresponding to amino acids 269-356 of D11853_PEA_{—}1_P1 (SEQ ID NO:588), wherein said first amino acid sequence, second amino acid sequence and third amino acid sequence are contiguous and in a sequential order.

[2023] 2. An isolated polypeptide encoding for a head of D11853_PEA_{—}1_P1 (SEQ ID NO:588), comprising a polypeptide being at least 70%, optionally at least about 80%, preferably at least about 85%, more preferably at least about 90% and most preferably at least about 95% homologous to the sequence MLARAARGTGALLLRGSLLASGRAPRRASSGLPRNTVVLFVPQQEAWVVERMGRFHRI LEPGLNILIPVLDRIRYVQSLKEIVINVPEQSAVTLDNVTLQIDGVLYLRI of D11853_PEA_{—}1_P1 (SEQ ID NO:588).

[2024] 3. An isolated polypeptide encoding for a tail of D11853_PEA_{—}1_P1 (SEQ ID NO:588), comprising a polypeptide being at least 70%, optionally at least about 80%, preferably at least about 85%, more preferably at least about 90% and most preferably at least about 95% homologous to the sequence NGDAAASLTVAEQYVSAFSKLAKDSNTILLPSNPGDVTSMVAQAMGVYGALTKAPVP GTPDSLSSGSSRDVQGTDASLDEELDRVKMS in D11853_PEA_{—}1_P1 (SEQ ID NO:588).

[2025] Comparison report between D11853_PEA_{—}1_P1 (SEQ ID NO:588) and Q96FY2 (SEQ ID NO: 638):

[2026] 1. An isolated chimeric polypeptide encoding for D11853_PEA_{—}1_P1 (SEQ ID NO:588) comprising a first amino acid sequence being at least 90% homologous to MLARAARGTGALLLRGSLLASGRAPRRASSGLPRNTVVLFVPQQEAWVVERMGRFHRI LEPGLNILIPVLDRIRYVQSLKEIVINVPEQSAVTLDNVTLQIDGVLYLRIMDPYKASYGV EDPEYAVTQ corresponding to amino acids 1-128 of Q96FY2 (SEQ ID NO:638), which also corresponds to amino acids 1-128 of D11853_PEA_{—}1_P1 (SEQ ID NO:588), a bridging amino acid L corresponding to amino acid 129 of D11853_PEA_{—}1_P1 (SEQ ID NO:588), and a second amino acid sequence being at least 90% homologous to AQTTMRSELGKLSLDKVFRERESLNASIVDAINQAADCWGIRCLRYEIKDIHVPPRVKES MQMQVEAERRKRATVLESEGTRESAINVAEGKKQAQILASEAEKAEQINQAAGEASAV LAKAKAKAEAIRILAAALTQHNGDAAASLTVAEQYVSAFSKLAKDSNTILLPSNPGDVT SMVAQAMGVYGALTKAPVPGTPDSLSSGSSRDVQGTDASLDEELDRVKMS corresponding to amino acids 130-356 of Q96FY2 (SEQ ID NO:638), which also corresponds to amino acids 130-356 of D11853_PEA_{—}1_P1 (SEQ ID NO:588), wherein said first amino acid sequence, bridging amino acid and second amino acid sequence are contiguous and in a sequential order.

[2027] The location of the variant protein was determined according to results from a number of different software programs and analyses, including analyses from SignalP and other specialized programs. The variant protein is believed to be located as follows with regard to the cell: secreted. The protein localization is believed to be secreted because one of the two signal-peptide prediction programs (HMM:Signal peptide,NN:NO) predicts that this protein has a signal peptide.

[2028] Variant protein D11853_PEA_{—}1_P1 (SEQ ID NO:588) also has the following non-silent SNPs (Single Nucleotide Polymorphisms) as listed in Table 6, (given according to their position(s) on the amino acid sequence, with the alternative amino acid(s) listed; the last column indicates whether the SNP is known or not; the presence of known SNPs in variant protein D11853_PEA_{—}1_P1 (SEQ ID NO:588) sequence provides support for the deduced sequence of this variant protein according to the present invention).

[2029] Variant protein D11853_PEA_{—}1_P1 (SEQ ID NO:588) is encoded by the following transcript(s): D11853_PEA_{—}1_T1 (SEQ ID NO:57), for which the sequence(s) is/are given at the end of the application. The coding portion of transcript D11853_PEA_{—}1_T1 (SEQ ID NO:57) is shown in bold; this coding portion starts at position 108 and ends at position 1175. The transcript also has the following SNPs as listed in Table 7 (given according to their position on the nucleotide sequence, with the alternative nucleic acid listed; the last column indicates whether the SNP is known or not; the presence of known SNPs in variant protein D11853_PEA_{—}1_P1 (SEQ ID NO:588) sequence provides support for the deduced sequence of this variant protein according to the present invention).

[2030] Variant protein D11853_PEA_{—}1_P2 (SEQ ID NO:589) according to the present invention has an amino acid sequence as given at the end of the application; it is encoded by transcript(s) D11853_PEA_{—}1_T3 (SEQ ID NO:58). An alignment is given to the known protein (Membrane associated protein SLP-2 (SEQ ID NO:637)) at the end of the application. One or more alignments to one or more previously published protein sequences are given at the end of the application. A brief description of the relationship of the variant protein according to the present invention to each such aligned protein is as follows:

[2031] Comparison report between D11853_PEA_{—}1_P2 (SEQ ID NO:589) and Q9P₀₄₂ (SEQ ID NO: 639):

[2032] 1. An isolated chimeric polypeptide encoding for D11853_PEA_{—}1_P2 (SEQ ID NO:589), comprising a first amino acid sequence being at least 70%, optionally at least 80%, preferably at least 85%, more preferably at least 90% and most preferably at least 95% homologous to a polypeptide having the sequence MLARAARGTGALLLRGSLLASGRAPR (SEQ ID NO:1530) corresponding to amino acids 1-26 of D11853_PEA_{—}1_P2 (SEQ ID NO:589), a second amino acid sequence being at least 90% homologous to RASSGLPRNTVVLFVPQQEAWVVERMGRFHRILEPGLNILIPVLDRIRYVQSLKEIVINVP EQSAVTLDNVTLQIDGVLYLRIMDPYKASYGVEDPEYAVTQLAQTTMRSELGKLSLDK VFRERESLNASIVDAINQAADCWGIRCLRYEIKDIHVPPRVKESMQMQVEAERRKR corresponding to amino acids 13-187 of Q9P₀₄₂ (SEQ ID NO:639), which also corresponds to amino acids 27-201 of D11853_PEA_{—}1_P2 (SEQ ID NO:589), a bridging amino acid A corresponding to amino acid 202 of D11853_PEA_{—}1_P2 (SEQ ID NO:589), a third amino acid sequence being at least 90% homologous to TVLESEGTRESAINVAEGKKQAQILASEAEKAEQINQAAGEASAVLAKAKAKAEAIRIL AAALTQHNGDAAASLTVAEQYVSAFSKLAKDSNTILLPSNPGDVTSMVAQ corresponding to amino acids 189-297 of Q9P₀₄₂ (SEQ ID NO:639), which also corresponds to amino acids 203-311 of D11853_PEA_{—}1_P2 (SEQ ID NO:589), and a fourth amino acid sequence being at least 70%, optionally at least 80%, preferably at least 85%, more preferably at least 90% and most preferably at least 95% homologous to a polypeptide having the sequence VRAL (SEQ ID NO:1533) corresponding to amino acids 312-315 of D11853_PEA_{—}1_P2 (SEQ ID NO:589), wherein said first amino acid sequence, second amino acid sequence, bridging amino acid, third amino acid sequence and fourth amino acid sequence are contiguous and in a sequential order.

[2033] 2. An isolated polypeptide encoding for a head of D11853_PEA_{—}1_P2 (SEQ ID NO:589), comprising a polypeptide being at least 70%, optionally at least about 80%, preferably at least about 85%, more preferably at least about 90% and most preferably at least about 95% homologous to the sequence MLARAARGTGALLLRGSLLASGRAPR (SEQ ID NO:1530) of D11853_PEA_{—}1_P2 (SEQ ID NO:589).

[2034] 3. An isolated polypeptide encoding for a tail of D11853_PEA_{—}1_P2 (SEQ ID NO:589), comprising a polypeptide being at least 70%, optionally at least about 80%, preferably at least about 85%, more preferably at least about 90% and most preferably at least about 95% homologous to the sequence VRAL (SEQ ID NO:1533) in D11853_PEA_{—}1_P2 (SEQ ID NO:589).

[2035] Comparison report between D11853_PEA_{—}1_P2 (SEQ ID NO:589) and BAC85377 (SEQ ID NO: 640):

[2036] 1. An isolated chimeric polypeptide encoding for D11853_PEA_{—}1_P2 (SEQ ID NO:589), comprising a first amino acid sequence being at least 70%, optionally at least 80%, preferably at least 85%, more preferably at least 90% and most preferably at least 95% homologous to a polypeptide having the sequence MLARAARGTGALLLRGSLLASGRAPRRASSGLPRNTVVLFVPQQEAWVVERMGRFHRI LEPGLNILIPVLDRIRYVQSLKEIVINVPEQSAVTLDNVTLQIDGVLYLRI corresponding to amino acids 1-109 of D11853_PEA_{—}1_P2 (SEQ ID NO:589), a second amino acid sequence being at least 90% homologous to MDPYKASYGVEDPEYAVTQLAQTTMRSELGKLSLDKVFRERESLNASIVDAINQAADC WGIRCLRYEIKDIHVPPRVKESMQMQVEAERRKRATVLESEGTRESAINVAEGKKQAQI LASEAEKAEQINQAAGEASAVLAKAKAKAEAIRILAAALTQH corresponding to amino acids 1-159 of BAC85377 (SEQ ID NO:640), which also corresponds to amino acids 110-268 of D11853_PEA_{—}1_P2 (SEQ ID NO:589), and a third amino acid sequence being at least 70%, optionally at least 80%, preferably at least 85%, more preferably at least 90% and most preferably at least 95% homologous to a polypeptide having the sequence NGDAAASLTVAEQYVSAFSKLAKDSNTILLPSNPGDVTSMVAQVRAL corresponding to amino acids 269-315 of D11853_PEA_{—}1_P2 (SEQ ID NO:589), wherein said first amino acid sequence, second amino acid sequence and third amino acid sequence are contiguous and in a sequential order.

[2037] 2. An isolated polypeptide encoding for a head of D111853_PEA_{—}1_P2 (SEQ ID NO:589), comprising a polypeptide being at least 70%, optionally at least about 80%, preferably at least about 85%, more preferably at least about 90% and most preferably at least about 95% homologous to the sequence MLARAARGTGALLLRGSLLASGRAPRRASSGLPRNTVVLFVPQQEAWVVERMGRFHRI LEPGLNILIPVLDRIRYVQSLKEIVINVPEQSAVTLDNVTLQIDGVLYLRI of D11853_PEA_{—}1_{—P}2 (SEQ ID NO:589).

[2038] 3. An isolated polypeptide encoding for a tail of D11853_PEA_{—}1_P2 (SEQ ID NO:589), comprising a polypeptide being at least 70%, optionally at least about 80%, preferably at least about 85%, more preferably at least about 90% and most preferably at least about 95% homologous to the sequence NGDAAASLTVAEQYVSAFSKLAKDSNTILLPSNPGDVTSMVAQVRAL in D11853_PEA_{—}1_{—P}2 (SEQ ID NO:589).

[2039] Comparison report between D11853_PEA_{—}1_P2 (SEQ ID NO:589) and Q96FY2 (SEQ ID NO:638):

[2040] 1. An isolated chimeric polypeptide encoding for D11853_PEA_{—}1_{—P}2 (SEQ ID NO:589), comprising a first amino acid sequence being at least 90% homologous to MLARAARGTGALLLRGSLLASGRAPRRASSGLPRNTVVLFVPQQEAWVVERMGRFHRI LEPGLNILIPVLDRIRYVQSLKEIVINVPEQSAVTLDNVTLQIDGVLYLRIMDPYKASYGV EDPEYAVTQ corresponding to amino acids 1-128 of Q96FY2 (SEQ ID NO:638), which also corresponds to amino acids 1-128 of D11853_PEA_{—}1_P2 (SEQ ID NO:589), a bridging amino acid L corresponding to amino acid 129 of D11853_PEA_{—}1_P2 (SEQ ID NO:589), a second amino acid sequence being at least 90% homologous to AQTTMRSELGKLSLDKVFRERESLNASIVDAINQAADCWGIRCLRYEIKDIHVPPRVKES MQMQVEAERRKRATVLESEGTRESAINVAEGKKQAQILASEAEKAEQINQAAGEASAV LAKAKAKAEAIRILAAALTQHNGDAAASLTVAEQYVSAFSKLAKDSNTILLPSNPGDVT SMVAQ corresponding to amino acids 130-311 of Q96FY2 (SEQ ID NO:638), which also corresponds to amino acids 130-311 of D11853_PEA_{—}1_P2 (SEQ ID NO:589), and a third amino acid sequence being at least 70%, optionally at least 80%, preferably at least 85%, more preferably at least 90% and most preferably at least 95% homologous to a polypeptide having the sequence VRAL (SEQ ID NO:1533) corresponding to amino acids 312-315 of D11853_PEA_{—}1_P2 (SEQ ID NO:589), wherein said first amino acid sequence, bridging amino acid, second amino acid sequence and third amino acid sequence are contiguous and in a sequential order.

[2041] 2. An isolated polypeptide encoding for a tail of D11853_PEA_{—}1_P2 (SEQ ID NO:589), comprising a polypeptide being at least 70%, optionally at least about 80%, preferably at least about 85%, more preferably at least about 90% and most preferably at least about 95% homologous to the sequence VRAL (SEQ ID NO:1533) in D11853_PEA_{—}1_P2 (SEQ ID NO:589).

[2042] Comparison report between D11853_PEA_{—}1_P2 (SEQ ID NO:589) and Q9UJZ1 (SEQ ID NO:637):

[2043] 1. An isolated chimeric polypeptide encoding for D11853_PEA_{—}1_P2 (SEQ ID NO:589), comprising a first amino acid sequence being at least 90% homologous to MLARAARGTGALLLRGSLLASGRAPRRASSGLPRNTVVLFVPQQEAWVVERMGRFHRI LEPGLNILIPVLDRIRYVQSLKEIVINVPEQSAVTLDNVTLQIDGVLYLRIMDPYKASYGV EDPEYAVTQLAQTTMRSELGKLSLDKVFRERESLNASIVDAINQAADCWGIRCLRYEIK DIHVPPRVKESMQMQVEAERRKRATVLESEGTRESAINVAEGKKQAQILASEAEKAEQI NQAAGEASAVLAKAKAKAEAIRILAAALTQHNGDAAASLTVAEQYVSAFSKLAKDSN TILLPSNPGDVTSMVAQ corresponding to amino acids 1-311 of Q9UJZ1 (SEQ ID NO:637), which also corresponds to amino acids 1-311 of D11853_PEA_{—}1_P2 (SEQ ID NO:589), and a second amino acid sequence being at least 70%, optionally at least 80%, preferably at least 85%, more preferably at least 90% and most preferably at least 95% homologous to a polypeptide having the sequence VRAL (SEQ ID NO:1533) corresponding to amino acids 312-315 of D11853_PEA_{—}1_P2 (SEQ ID NO:589), wherein said first amino acid sequence and second amino acid sequence are contiguous and in a sequential order.

[2044] 2. An isolated polypeptide encoding for a tail of D11853_PEA_{—}1_P2 (SEQ ID NO:589), comprising a polypeptide being at least 70%, optionally at least about 80%, preferably at least about 85%, more preferably at least about 90% and most preferably at least about 95% homologous to the sequence VRAL (SEQ ID NO:1533) in D11853_PEA_{—}1_P2 (SEQ ID NO:589).

[2045] The location of the variant protein was determined according to results from a number of different software programs and analyses, including analyses from SignalP and other specialized programs. The variant protein is believed to be located as follows with regard to the cell: secreted. The protein localization is believed to be secreted because one of the two signal-peptide prediction programs (HMM:Signal peptide,NN:NO) predicts that this protein has a signal peptide.

[2046] Variant protein D11853_PEA_{—}1_P2 (SEQ ID NO:589) also has the following non-silent SNPs (Single Nucleotide Polymorphisms) as listed in Table 8, (given according to their position(s) on the amino acid sequence, with the alternative amino acid(s) listed; the last column indicates whether the SNP is known or not; the presence of known SNPs in variant protein D11853_PEA_{—}1_P2 (SEQ ID NO:589) sequence provides support for the deduced sequence of this variant protein according to the present invention).

[2047] Variant protein D11853_PEA_{—}1_P2 (SEQ ID NO:589) is encoded by the following transcript(s): D11853_PEA_{—}1_T3 (SEQ ID NO:58), for which the sequence(s) is/are given at the end of the application. The coding portion of transcript D11853_PEA_{—}1_T3 (SEQ ID NO:58) is shown in bold; this coding portion starts at position 108 and ends at position 1052. The transcript also has the following SNPs as listed in Table 9 (given according to their position on the nucleotide sequence, with the alternative nucleic acid listed; the last column indicates whether the SNP is known or not; the presence of known SNPs in variant protein D11853_PEA_{—}1_P2 (SEQ ID NO:589) sequence provides support for the deduced sequence of this variant protein according to the present invention).

[2048] Variant protein D11853_PEA_{—}1_P7 (SEQ ID NO:590) according to the present invention has an amino acid sequence as given at the end of the application; it is encoded by transcript(s) D11853_PEA_{—}1_T10 (SEQ ID NO:62). An alignment is given to the known protein (Membrane associated protein SLP-2 (SEQ ID NO:637)) at the end of the application. One or more alignments to one or more previously published protein sequences are given at the end of the application. A brief description of the relationship of the variant protein according to the present invention to each such aligned protein is as follows:

[2049] Comparison report between D11853_PEA_{—}1_P7 (SEQ ID NO:590) and Q9P₀₄₂ (SEQ ID NO:639):

[2050] 1. An isolated chimeric polypeptide encoding for D11853_PEA_{—}1_P7 (SEQ ID NO:590), comprising a first amino acid sequence being at least 70%, optionally at least 80%, preferably at least 85%, more preferably at least 90% and most preferably at least 95% homologous to a polypeptide having the sequence MLARAARGTGALLLRGSLLASGRAPR (SEQ ID NO:1530) corresponding to amino acids 1-26 of D11853_PEA_{—}1_P7 (SEQ ID NO:590), a second amino acid sequence being at least 90% homologous to RASSGLPRNTVVLFVPQQEAWVVERMGRFHRILEPGLNILIPVLDRIRYVQSLKEIVINVP EQSAVTLDNVTLQIDGVLYLRIMDPYKASYGVEDPEYAVTQLAQTTMRSELGKLSLDK VFRERESLNASIVDAINQAADCWGIRCLRYEIKDIHVPPRVKESMQMQVEAERRKR corresponding to amino acids 13-187 of Q9P₀₄₂ (SEQ ID NO:639), which also corresponds to amino acids 27-201 of D11853_PEA_{—}1_P7 (SEQ ID NO:590), a bridging amino acid A corresponding to amino acid 202 of D11853_PEA_{—}1_P7 (SEQ ID NO:590), a third amino acid sequence being at least 90% homologous to TVLESEGTRESAINVAEGKKQAQILASEAEKAEQINQAAGEASAVLAKAKAKAEAIRIL AAALTQH corresponding to amino acids 189-254 of Q9P₀₄₂ (SEQ ID NO:639), which also corresponds to amino acids 203-268 of D11853_PEA_{—}1_P7 (SEQ ID NO:590, and a fourth amino acid sequence being at least 70%, optionally at least 80%, preferably at least 85%, more preferably at least 90% and most preferably at least 95% homologous to a polypeptide having the sequence VRGPWVGMGTGIDSGRGSLIYA (SEQ ID NO:1535) corresponding to amino acids 269-290 of D11853_PEA_{—}1_P7 (SEQ ID NO:590), wherein said first amino acid sequence, second amino acid sequence, bridging amino acid, third amino acid sequence and fourth amino acid sequence are contiguous and in a sequential order.

[2051] 2. An isolated polypeptide encoding for a head of D11853_PEA_{—}1_P7 (SEQ ID NO:590), comprising a polypeptide being at least 70%, optionally at least about 80%, preferably at least about 85%, more preferably at least about 90% and most preferably at least about 95% homologous to the sequence MLARAARGTGALLLRGSLLASGRAPR (SEQ ID NO:1530) of D11853_PEA_{—}1_{—P}7 (SEQ ID NO:590).

[2052] 3. An isolated polypeptide encoding for a tail of D11853_PEA_{—}1_P7 (SEQ ID NO:590), comprising a polypeptide being at least 70%, optionally at least about 80%, preferably at least about 85%, more preferably at least about 90% and most preferably at least about 95% homologous to the sequence VRGPWVGMGTGIDSGRGSLIYA (SEQ ID NO:1535) in D11853_PEA_{—}1_P7 (SEQ ID NO:590).

[2053] Comparison report between D11853_PEA_{—}1_P7 (SEQ ID NO:590) and BAC85377 (SEQ ID NO:640):

[2054] 1. An isolated chimeric polypeptide encoding for D11853_PEA_{—}1_P7 (SEQ ID NO:590), comprising a first amino acid sequence being at least 70%, optionally at least 80%, preferably at least 85%, more preferably at least 90% and most preferably at least 95% homologous to a polypeptide having the sequence MLARAARGTGALLLRGSLLASGRAPRRASSGLPRNTVVLFVPQQEAWVVERMGRFHRI LEPGLNILIPVLDRIRYVQSLKEIVINVPEQSAVTLDNVTLQIDGVLYLRI corresponding to amino acids 1-109 of D11853_PEA_{—}1_P7 (SEQ ID NO:590), and a second amino acid sequence being at least 90% homologous to MDPYKASYGVEDPEYAVTQLAQTTMRSELGKLSLDKVFRERESLNASIVDAINQAADC WGIRCLRYEIKDIHVPPRVKESMQMQVEAERRKRATVLESEGTRESAINVAEGKKQAQI LASEAEKAEQINQAAGEASAVLAKAKAKAEAIRILAAALTQHVRGPWVGMGTGIDSGR GSLIYA corresponding to amino acids 1-181 of BAC85377 (SEQ ID NO:640), which also corresponds to amino acids 110-290 of D11853_PEA_{—}1_P7 (SEQ ID NO:590), wherein said first amino acid sequence and second amino acid sequence are contiguous and in a sequential order.

[2055] 2. An isolated polypeptide encoding for a head of D11853_PEA_{—}1_P7 (SEQ ID NO:590), comprising a polypeptide being at least 70%, optionally at least about 80%, preferably at least about 85%, more preferably at least about 90% and most preferably at least about 95% homologous to the sequence MLARAARGTGALLLRGSLLASGRAPRRASSGLPRNTVVLFVPQQEAWVVERMGRFHRI LEPGLNILIPVLDRIRYVQSLKEIVINVPEQSAVTLDNVTLQIDGVLYLRI of D11853_PEA_{—}1_P7 (SEQ ID NO:590).

[2056] Comparison report between D11853_PEA_{—}1_P7 (SEQ ID NO:590) and Q96FY2 (SEQ ID NO 638):

[2057] 1. An isolated chimeric polypeptide encoding for D11853_PEA_{—}1_P7 (SEQ ID NO:590), comprising a first amino acid sequence being at least 90% homologous to MLARAARGTGALLLRGSLLASGRAPRRASSGLPRNTVVLFVPQQEAWVVERMGRFHRI LEPGLNILIPVLDRIRYVQSLKEIVINVPEQSAVTLDNVTLQIDGVLYLRIMDPYKASYGV EDPEYAVTQ corresponding to amino acids 1-128 of Q96FY2 (SEQ ID NO:638), which also corresponds to amino acids 1-128 of D11853_PEA_{—}1_P7 (SEQ ID NO:590), a bridging amino acid L corresponding to amino acid 129 of D11853_PEA_{—}1_P7 (SEQ ID NO:590), a second amino acid sequence being at least 90% homologous to AQTTMRSELGKLSLDKVFRERESLNASIVDAINQAADCWGIRCLRYEIKDIHVPPRVKES MQMQVEAERRKRATVLESEGTRESAINVAEGKKQAQILASEAEKAEQINQAAGEASAV LAKAKAKAEAIRILAAALTQH corresponding to amino acids 130-268 of Q96FY2 (SEQ ID NO:638), which also corresponds to amino acids 130-268 of D11853_PEA_{—}1_P7 (SEQ ID NO:590), and a third amino acid sequence being at least 70%, optionally at least 80%, preferably at least 85%, more preferably at least 90% and most preferably at least 95% homologous to a polypeptide having the sequence VRGPWVGMGTGIDSGRGSLIYA (SEQ ID NO:1535) corresponding to amino acids 269-290 of D11853_PEA_{—}1_P7 (SEQ ID NO:590), wherein said first amino acid sequence, bridging amino acid, second amino acid sequence and third amino acid sequence are contiguous and in a sequential order.

[2058] 2. An isolated polypeptide encoding for a tail of D11853_PEA_{—}1_P7 (SEQ ID NO:590), comprising a polypeptide being at least 70%, optionally at least about 80%, preferably at least about 85%, more preferably at least about 90% and most preferably at least about 95% homologous to the sequence VRGPWVGMGTGIDSGRGSLIYA (SEQ ID NO:1535) in D11853_PEA_{—}1_{—P}7 (SEQ ID NO:590).

[2059] Comparison report between D11853_PEA_{—}1_P7 (SEQ ID NO:590) and Q9UJZ1 (SEQ ID NO:637):

[2060] 1. An isolated chimeric polypeptide encoding for D11853_PEA_{—}1_P7 (SEQ ID NO:590), comprising a first amino acid sequence being at least 90% homologous to MLARAARGTGALLLRGSLLASGRAPRRASSGLPRNTVVLFVPQQEAWVVERMGRFHRI LEPGLNILIPVLDRIRYVQSLKEIVINVPEQSAVTLDNVTLQIDGVLYLRIMDPYKASYGV EDPEYAVTQLAQTTMRSELGKLSLDKVFRERESLNASIVDAINQAADCWGIRCLRYEIK DIHVPPRVKESMQMQVEAERRKRATVLESEGTRESAINVAEGKKQAQILASEAEKAEQI NQAAGEASAVLAKAKAKAEAIRILAAALTQH corresponding to amino acids 1-268 of Q9UJZ1 (SEQ ID NO:637), which also corresponds to amino acids 1-268 of D11853_PEA_{—}1_P7 (SEQ ID NO:590), and a second amino acid sequence being at least 70%, optionally at least 80%, preferably at least 85%, more preferably at least 90% and most preferably at least 95% homologous to a polypeptide having the sequence VRGPWVGMGTGIDSGRGSLIYA (SEQ ID NO:1535) corresponding to amino acids 269-290 of D11853_PEA_{—}1_P7 (SEQ ID NO:590), wherein said first amino acid sequence and second amino acid sequence are contiguous and in a sequential order.

[2061] 2. An isolated polypeptide encoding for a tail of D11853_PEA_{—}1_P7 (SEQ ID NO:590), comprising a polypeptide being at least 70%, optionally at least about 80%, preferably at least about 85%, more preferably at least about 90% and most preferably at least about 95% homologous to the sequence VRGPWVGMGTGIDSGRGSLIYA (SEQ ID NO:1535) in D11853_PEA_{—}1_{—P}7 (SEQ ID NO:590).

[2062] The location of the variant protein was determined according to results from a number of different software programs and analyses, including analyses from SignalP and other specialized programs. The variant protein is believed to be located as follows with regard to the cell: secreted. The protein localization is believed to be secreted because one of the two signal-peptide prediction programs (HMM:Signal peptide,NN:NO) predicts that this protein has a signal peptide.

[2063] Variant protein D11853_PEA_{—}1_P7 (SEQ ID NO:590) also has the following non-silent SNPs (Single Nucleotide Polymorphisms) as listed in Table 10, (given according to their position(s) on the amino acid sequence, with the alternative amino acid(s) listed; the last column indicates whether the SNP is known or not; the presence of known SNPs in variant protein D11853_PEA_{—}1_P7 (SEQ ID NO:590) sequence provides support for the deduced sequence of this variant protein according to the present invention).

[2064] Variant protein D11853_PEA_{—}1_P7 (SEQ ID NO:590) is encoded by the following transcript(s): D11853_PEA_{—}1_T10 (SEQ ID NO:62), for which the sequence(s) is/are given at the end of the application. The coding portion of transcript D11853_PEA_{—}1_T10 (SEQ ID 2) is shown in bold; this coding portion starts at position 108 and ends at position 977. The transcript also has the following SNPs as listed in Table 11 (given according to their position on the nucleotide sequence, with the alternative nucleic acid listed; the last column indicates whether the SNP is known or not; the presence of known SNPs in variant protein D11853_PEA_{—}1_P7 (SEQ ID NO:590) sequence provides support for the deduced sequence of this variant protein according to the present invention).

[2065] Variant protein D11853_PEA_{—}1_P9 (SEQ ID NO:591) according to the present invention has an amino acid sequence as given at the end of the application; it is encoded by transcript(s) D11853_PEA_{—}1_T13 (SEQ ID NO:63). An alignment is given to the known protein (Membrane associated protein SLP-2 (SEQ ID NO:637)) at the end of the application. One or more alignments to one or more previously published protein sequences are given at the end of the application. A brief description of the relationship of the variant protein according to the present invention to each such aligned protein is as follows:

[2066] Comparison report between D11853_PEA_{—}1_P9 (SEQ ID NO:591) and Q9P₀₄₂ (SEQ ID NO:639:

[2067] 1. An isolated chimeric polypeptide encoding for D11853_PEA_{—}1_P9 (SEQ ID NO:591), comprising a first amino acid sequence being at least 70%, optionally at least 80%, preferably at least 85%, more preferably at least 90% and most preferably at least 95% homologous to a polypeptide having the sequence MLARAARGTGALLLRGSLLASGRAPR (SEQ ID NO:1530) corresponding to amino acids 1-26 of D11853_PEA_{—}1_P9 (SEQ ID NO:591), a second amino acid sequence being at least 90% homologous to RASSGLPRNTVVLFVPQQEAWVVERMGRFHRILEPGLNILIPVLDRIRYVQSLKEIVINVP EQSAVTLDNVTLQIDGVLYLRIMDPYKASYGVEDPEYAVTQLAQTTMRSELGKLSLDK VFRERESLNASIVDAINQAADCWGIRCLRYEIKDIHVPPRVKESMQMQVEAERRKR corresponding to amino acids 13-187 of Q9P₀₄₂ (SEQ ID NO:639), which also corresponds to amino acids 27-201 of D11853_PEA_{—}1_P9 (SEQ ID NO:591), a bridging amino acid A corresponding to amino acid 202 of D11853_PEA_{—}1_P9 (SEQ ID NO:591), a third amino acid sequence being at least 90% homologous to TVLESEGTRESAINVAEGKKQAQILASEAEKAEQINQA corresponding to amino acids 189-226 of Q9P₀₄₂ (SEQ ID NO:639), which also corresponds to amino acids 203-240 of D11853_PEA_{—}1_P9 (SEQ ID NO:591), a fourth amino acid sequence being at least 70%, optionally at least 80%, preferably at least 85%, more preferably at least 90% and most preferably at least 95% homologous to a polypeptide having the sequence AGQERVEAEGGARHGPLKIGAGAGSLGYFDFMGQASSVPSL (SEQ ID NO:1538) corresponding to amino acids 241-281 of D11853_PEA_{—}1_P9 (SEQ ID NO:591), and a fifth amino acid sequence being at least 90% homologous to AGEASAVLAKAKAKAEAIRILAAALTQHNGDAAASLTVAEQYVSAFSKLAKDSNTILL PSNPGDVTSMVAQAMGVYGALTKAPVPGTPDSLSSGSSRDVQGTDASLDEELDRVKM S corresponding to amino acids 227-342 of Q9P₀₄₂ (SEQ ID NO:639), which also corresponds to amino acids 282-397 of D11853_PEA_{—}1_P9 (SEQ ID NO:591), wherein said first amino acid sequence, second amino acid sequence, bridging amino acid, third amino acid sequence, fourth amino acid sequence and fifth amino acid sequence are contiguous and in a sequential order.

[2068] 2. An isolated polypeptide encoding for a head of D11853_PEA_{—}1_P9 (SEQ ID NO:591), comprising a polypeptide being at least 70%, optionally at least about 80%, preferably at least about 85%, more preferably at least about 90% and most preferably at least about 95% homologous to the sequence MLARAARGTGALLLRGSLLASGRAPR (SEQ ID NO:1530) of D11853_PEA_{—}1_{—P}9 (SEQ ID NO:591).

[2069] 3. An isolated polypeptide encoding for an edge portion of D11853_PEA_{—}1_P9 (SEQ ID NO:591), comprising an amino acid sequence being at least 70%, optionally at least about 80%, preferably at least about 85%, more preferably at least about 90% and most preferably at least about 95% homologous to the sequence encoding for AGQERVEAEGGARHGPLKIGAGAGSLGYFDFMGQASSVPSL (SEQ ID NO:1538), corresponding to D11853_PEA_{—}1_P9 (SEQ ID NO:591).

[2070] Comparison report between D11853_PEA_{—}1_P9 (SEQ ID NO:591) and BAC85377 (SEQ ID NO:640):

[2071] 1. An isolated chimeric polypeptide encoding for D11853_PEA_{—}1_P9 (SEQ ID NO:591), comprising a first amino acid sequence being at least 70%, optionally at least 80%, preferably at least 85%, more preferably at least 90% and most preferably at least 95% homologous to a polypeptide having the sequence MLARAARGTGALLLRGSLLASGRAPRRASSGLPRNTVVLFVPQQEAWVVERMGRFHRI LEPGLNILIPVLDRIRYVQSLKEIVINVPEQSAVTLDNVTLQIDGVLYLRI corresponding to amino acids 1-109 of D11853_PEA_{—}1_P9 (SEQ ID NO:591), a second amino acid sequence being at least 90% homologous to MDPYKASYGVEDPEYAVTQLAQTTMRSELGKLSLDKVFRERESLNASIVDAINQAADC WGIRCLRYEIKDIHVPPRVKESMQMQVEAERRKRATVLESEGTRESAINVAEGKKQAQI LASEAEKAEQINQA corresponding to amino acids 1-131 of BAC85377 (SEQ ID NO:640), which also corresponds to amino acids 110-240 of D11853_PEA_{—}1_P9 (SEQ ID NO:591), a third amino acid sequence being at least 70%, optionally at least 80%, preferably at least 85%, more preferably at least 90% and most preferably at least 95% homologous to a polypeptide having the sequence AGQERVEAEGGARHGPLKIGAGAGSLGYFDFMGQASSVPSL (SEQ ID NO:1538) corresponding to amino acids 241-281 of D11853_PEA_{—}1_P9 (SEQ ID NO:591) a fourth amino acid sequence being at least 90% homologous to AGEASAVLAKAKAKAEAIRILAAALTQH corresponding to amino acids 132-159 of BAC85377 (SEQ ID NO:640), which also corresponds to amino acids 282-309 of D11853_PEA_{—}1_P9 (SEQ ID NO:591), and a fifth amino acid sequence being at least 70%, optionally at least 80%, preferably at least 85%, more preferably at least 90% and most preferably at least 95% homologous to a polypeptide having the sequence NGDAAASLTVAEQYVSAFSKLAKDSNTILLPSNPGDVTSMVAQAMGVYGALTKAPVP GTPDSLSSGSSRDVQGTDASLDEELDRVKMS (SEQ ID NO:1531) corresponding to amino acids 310-397 of D11853_PEA_{—}1_P9 (SEQ ID NO:591), wherein said first amino acid sequence, second amino acid sequence, third amino acid sequence, fourth amino acid sequence and fifth amino acid sequence are contiguous and in a sequential order.

[2072] 2. An isolated polypeptide encoding for a head of D11853_PEA_{—}1_P9 (SEQ ID NO:591), comprising a polypeptide being at least 70%, optionally at least about 80%, preferably at least about 85%, more preferably at least about 90% and most preferably at least about 95% homologous to the sequence MLARAARGTGALLLRGSLLASGRAPRRASSGLPRNTVVLFVPQQEAWVVERMGRFHRI LEPGLNILIPVLDRIRYVQSLKEIVINVPEQSAVTLDNVTLQIDGVLYLRI of D11853_PEA_{—}1_{—P}9 (SEQ ID NO:591).

[2073] 3. An isolated polypeptide encoding for an edge portion of D11853_PEA_{—}1_P9 (SEQ ID NO:591), comprising an amino acid sequence being at least 70%, optionally at least about 80%, preferably at least about 85%, more preferably at least about 90% and most preferably at least about 95% homologous to the sequence encoding for AGQERVEAEGGARHGPLKIGAGAGSLGYFDFMGQASSVPSL (SEQ ID NO:1538), corresponding to D11853_PEA_{—}1_P9 (SEQ ID NO:591).

[2074] 4. An isolated polypeptide encoding for a tail of D11853_PEA_{—}1_P9 (SEQ ID NO:591), comprising a polypeptide being at least 70%, optionally at least about 80%, preferably at least about 85%, more preferably at least about 90% and most preferably at least about 95% homologous to the sequence NGDAAASLTVAEQYVSAFSKLAKDSNTILLPSNPGDVTSMVAQAMGVYGALTKAPVP GTPDSLSSGSSRDVQGTDASLDEELDRVKMS (SEQ ID NO:1531) in D11853_PEA_{—}1_P9 (SEQ ID NO:591).

[2075] Comparison report between D11853_PEA_{—}1_P9 (SEQ ID NO:591) and Q96FY2 (SEQ ID NO:638):

[2076] 1. An isolated chimeric polypeptide encoding for D11853_PEA_{—}1_P9 (SEQ ID NO:591), comprising a first amino acid sequence being at least 90% homologous to MLARAARGTGALLLRGSLLASGRAPRRASSGLPRNTVVLFVPQQEAWVVERMGRFHRI LEPGLNILIPVLDRIRYVQSLKEIVINVPEQSAVTLDNVTLQIDGVLYLRIMDPYKASYGV EDPEYAVTQ corresponding to amino acids 1-128 of Q96FY2 (SEQ ID NO:638), which also corresponds to amino acids 1-128 of D11853_PEA_{—}1_P9 (SEQ ID NO:591), a bridging amino acid L corresponding to amino acid 129 of D11853_PEA_{—}1_P9 (SEQ ID NO:591), a second amino acid sequence being at least 90% homologous to AQTTMRSELGKLSLDKVFRERESLNASIVDAINQAADCWGIRCLRYEIKDIHVPPRVKES MQMQVEAERRKRATVLESEGTRESAINVAEGKKQAQILASEAEKAEQINQA corresponding to amino acids 130-240 of Q96FY2 (SEQ ID NO:638), which also corresponds to amino acids 130-240 of D11853_PEA_{—}1_P9 (SEQ ID NO:591), a third amino acid sequence being at least 70%, optionally at least 80%, preferably at least 85%, more preferably at least 90% and most preferably at least 95% homologous to a polypeptide having the sequence AGQERVEAEGGARHGPLKIGAGAGSLGYFDFMGQASSVPSL (SEQ ID NO:1538) corresponding to amino acids 241-281 of D11853_PEA_{—}1_P9 (SEQ ID NO:591), and a fourth amino acid sequence being at least 90% homologous to AGEASAVLAKAKAKAEAIRILAAALTQHNGDAAASLTVAEQYVSAFSKLAKDSNTILL PSNPGDVTSMVAQAMGVYGALTKAPVPGTPDSLSSGSSRDVQGTDASLDEELDRVKM S corresponding to amino acids 241-356 of Q96FY2 (SEQ ID NO:638), which also corresponds to amino acids 282-397 of D11853_PEA_{—}1_P9 (SEQ ID NO:591), wherein said first amino acid sequence, bridging amino acid, second amino acid sequence, third amino acid sequence and fourth amino acid sequence are contiguous and in a sequential order.

[2077] 2. An isolated polypeptide encoding for an edge portion of D11853_PEA_{—}1_P9 (SEQ ID NO:591), comprising an amino acid sequence being at least 70%, optionally at least about 80%, preferably at least about 85%, more preferably at least about 90% and most preferably at least about 95% homologous to the sequence encoding for AGQERVEAEGGARHGPLKIGAGAGSLGYFDFMGQASSVPSL (SEQ ID NO:1538), corresponding to D11853_PEA_{—}1_P9 (SEQ ID NO:591).

[2078] Comparison report between D11853_PEA_{—}1_P9 (SEQ ID NO:591) and Q9UJZ1 (SEQ ID NO:637):

[2079] 1. An isolated chimeric polypeptide encoding for D11853_PEA_{—}1_P9 (SEQ ID NO:591), comprising a first amino acid sequence being at least 90% homologous to MLARAARGTGALLLRGSLLASGRAPRRASSGLPRNTVVLFVPQQEAWVVERMGRFHRI LEPGLNILIPVLDRIRYVQSLKEIVINVPEQSAVTLDNVTLQIDGVLYLRIMDPYKASYGV EDPEYAVTQLAQTTMRSELGKLSLDKVFRERESLNASIVDAINQAADCWGIRCLRYEIK DIHVPPRVKESMQMQVEAERRKRATVLESEGTRESAINVAEGKKQAQILASEAEKAEQI NQA corresponding to amino acids 1-240 of Q9UJZ1 (SEQ ID NO:637), which also corresponds to amino acids 1-240 of D11853_PEA_{—}1_P9 (SEQ ID NO:591), a second amino acid sequence being at least 70%, optionally at least 80%, preferably at least 85%, more preferably at least 90% and most preferably at least 95% homologous to a polypeptide having the sequence AGQERVEAEGGARHGPLKIGAGAGSLGYFDFMGQASSVPSL (SEQ ID NO:1538) corresponding to amino acids 241-281 of D11853_PEA_{—}1_P9 (SEQ ID NO:591), and a third amino acid sequence being at least 90% homologous to AGEASAVLAKAKAKAEAIRILAAALTQHNGDAAASLTVAEQYVSAFSKLAKDSNTILL PSNPGDVTSMVAQAMGVYGALTKAPVPGTPDSLSSGSSRDVQGTDASLDEELDRVKM S corresponding to amino acids 241-356 of Q9UJZ1 (SEQ ID NO:637), which also corresponds to amino acids 282-397 of D11853_PEA_{—}1_P9 (SEQ ID NO:591), wherein said first amino acid sequence, second amino acid sequence and third amino acid sequence are contiguous and in a sequential order.

[2080] 2. An isolated polypeptide encoding for an edge portion of D11853_PEA_{—}1_P9 (SEQ ID NO:591), comprising an amino acid sequence being at least 70%, optionally at least about 80%, preferably at least about 85%, more preferably at least about 90% and most preferably at least about 95% homologous to the sequence encoding for AGQERVEAEGGARHGPLKIGAGAGSLGYFDFMGQASSVPSL (SEQ ID NO:1538), corresponding to D11853_PEA_{—}1_P9 (SEQ ID NO:591).

[2081] The location of the variant protein was determined according to results from a number of different software programs and analyses, including analyses from SignalP and other specialized programs. The variant protein is believed to be located as follows with regard to the cell: secreted. The protein localization is believed to be secreted because one of the two signal-peptide prediction programs (HMM:Signal peptide,NN:NO) predicts that this protein has a signal peptide.

[2082] Variant protein D11853_PEA_{—}1_P9 (SEQ ID NO:591) also has the following non-silent SNPs (Single Nucleotide Polymorphisms) as listed in Table 12, (given according to their position(s) on the amino acid sequence, with the alternative amino acid(s) listed; the last column indicates whether the SNP is known or not; the presence of known SNPs in variant protein D11853_PEA_{—}1_P9 (SEQ ID NO:591) sequence provides support for the deduced sequence of this variant protein according to the present invention).

[2083] Variant protein D11853_PEA_{—}1_P9 (SEQ ID NO:591) is encoded by the following transcript(s): D11853_PEA_{—}1_T13 (SEQ ID NO:63), for which the sequence(s) is/are given at the end of the application. The coding portion of transcript D11853_PEA_{—}1_T13 (SEQ ID NO:63) is shown in bold; this coding portion starts at position 108 and ends at position 1298. The transcript also has the following SNPs as listed in Table 13 (given according to their position on the nucleotide sequence, with the alternative nucleic acid listed; the last column indicates whether the SNP is known or not; the presence of known SNPs in variant protein D11853_PEA_{—}1_P9 (SEQ ID NO:591) sequence provides support for the deduced sequence of this variant protein according to the present invention).

[2084] Variant protein D11853_PEA_{—}1_P10 (SEQ ID NO:592) according to the present invention has an amino acid sequence as given at the end of the application; it is encoded by transcript(s) D11853_PEA_{—}1_T14 (SEQ ID NO:64). An alignment is given to the known protein (Membrane associated protein SLP-2 (SEQ ID NO:637)) at the end of the application. One or more alignments to one or more previously published protein sequences are given at the end of the application. A brief description of the relationship of the variant protein according to the present invention to each such aligned protein is as follows:

[2085] Comparison report between D11853_PEA_{—}1_P10 (SEQ ID NO:592) and Q9P₀₄₂ (SEQ ID NO:639):

[2086] 1. An isolated chimeric polypeptide encoding for D11853_PEA_{—}1_P10 (SEQ ID NO:592) comprising a first amino acid sequence being at least 70%, optionally at least 80%, preferably at least 85%, more preferably at least 90% and most preferably at least 95% homologous to a polypeptide having the sequence MLARAARGTGALLLRGSLLASGRAPR (SEQ ID NO:1530) corresponding to amino acids 1-26 of D11853_PEA_{—}1_P10 (SEQ ID NO:592), a second amino acid sequence being at least 90% homologous to RASSGLPRNTVVLFVPQQEAWVVERMGRFHRILEPGLNILIPVLDRIRYVQSLKEIVINVP EQSAVTLDNVTLQIDGVLYLRIMDPYKASYGVEDPEYAVTQLAQTTMRSELGKLSLDK VFRERESLNASIVDAINQAADCWGIRCLRYEIKDIHVPPRVKESMQMQVEAERRKR corresponding to amino acids 13-187 of Q9P₀₄₂ (SEQ ID NO:639), which also corresponds to amino acids 27-201 of D11853_PEA_{—}1_P10 (SEQ ID NO:592), a bridging amino acid A corresponding to amino acid 202 of D11853_PEA_{—}1_P10 (SEQ ID NO:592), a third amino acid sequence being at least 90% homologous to TVLESEGTRESAINVAEGKKQAQILASEAEKAEQINQAAGEASAVLAKAKAKAEAIRIL AAALTQH corresponding to amino acids 189-254 of Q9P₀₄₂ (SEQ ID NO:639), which also corresponds to amino acids 203-268 of D11853_PEA_{—}1_P10 (SEQ ID NO:592), and a fourth amino acid sequence being at least 90% homologous to AMGVYGALTKAPVPGTPDSLSSGSSRDVQGTDASLDEELDRVKMS (SEQ ID NO:1540) corresponding to amino acids 298-342 of Q9P₀₄₂ (SEQ ID NO:639), which also corresponds to amino acids 269-313 of D11853_PEA_{—}1_P10 (SEQ ID NO:592), wherein said first amino acid sequence, second amino acid sequence, bridging amino acid, third amino acid sequence and fourth amino acid sequence are contiguous and in a sequential order.

[2087] 2. An isolated polypeptide encoding for a head of D11853_PEA_{—}1_P10 (SEQ ID NO:592) comprising a polypeptide being at least 70%, optionally at least about 80%, preferably at least about 85%, more preferably at least about 90% and most preferably at least about 95% homologous to the sequence MLARAARGTGALLLRGSLLASGRAPR (SEQ ID NO:1530) of D11853_PEA_{—}1_P10 (SEQ ID NO:592).

[2088] 3. An isolated chimeric polypeptide encoding for an edge portion of D11853_PEA_{—}1_P10 (SEQ ID NO:592), comprising a polypeptide having a length “n”, wherein n is at least about 10 amino acids in length, optionally at least about 20 amino acids in length, preferably at least about 30 amino acids in length, more preferably at least about 40 amino acids in length and most preferably at least about 50 amino acids in length, wherein at least two amino acids comprise HA, having a structure as follows: a sequence starting from any of amino acid numbers 268−x to 268; and ending at any of amino acid numbers 269+((n−2)−x), in which x varies from 0 to n−2.

[2089] Comparison report between D11853_PEA_{—}1_P10 (SEQ ID NO:592) and BAC85377 (SEQ ID NO:640):

[2090] 1. An isolated chimeric polypeptide encoding for D11853_PEA_{—}1_P10 (SEQ ID NO:592) comprising a first amino acid sequence being at least 70%, optionally at least 80%, preferably at least 85%, more preferably at least 90% and most preferably at least 95% homologous to a polypeptide having the sequence MLARAARGTGALLLRGSLLASGRAPRRASSGLPRNTVVLFVPQQEAWVVERMGRFHRI LEPGLNILIPVLDRIRYVQSLKEIVINVPEQSAVTLDNVTLQIDGVLYLRI corresponding to amino acids 1-109 of D11853_PEA_{—}1_P10 (SEQ ID NO:592), a second amino acid sequence being at least 90% homologous to MDPYKASYGVEDPEYAVTQLAQTTMRSELGKLSLDKVFRERESLNASIVDAINQAADC WGIRCLRYEIKDIHVPPRVKESMQMQVEAERRKRATVLESEGTRESAINVAEGKKQAQI LASEAEKAEQINQAAGEASAVLAKAKAKAEAIRILAAALTQH corresponding to amino acids 1-159 of BAC85377 (SEQ ID NO:640), which also corresponds to amino acids 110-268 of D11853_PEA_{—}1_P10 (SEQ ID NO:592), and a third amino acid sequence being at least 70%, optionally at least 80%, preferably at least 85%, more preferably at least 90% and most preferably at least 95% homologous to a polypeptide having the sequence AMGVYGALTKAPVPGTPDSLSSGSSRDVQGTDASLDEELDRVKMS (SEQ ID NO:1540) corresponding to amino acids 269-313 of D11853_PEA_{—}1_P10 (SEQ ID NO:592), wherein said first amino acid sequence, second amino acid sequence and third amino acid sequence are contiguous and in a sequential order.

[2091] 2. An isolated polypeptide encoding for a head of D11853_PEA_{—}1_P10 (SEQ ID NO:592) comprising a polypeptide being at least 70%, optionally at least about 80%, preferably at least about 85%, more preferably at least about 90% and most preferably at least about 95% homologous to the sequence MLARAARGTGALLLRGSLLASGRAPRRASSGLPRNTVVLFVPQQEAWVVERMGRFHRI LEPGLNILIPVLDRIRYVQSLKEIVNVPEQSAVTLDNVTLQIDGVLYLRI of D11853_PEA_{—}1_P10 (SEQ ID NO:592).

[2092] 3. An isolated polypeptide encoding for a tail of D11853_PEA_{—}1_P10 (SEQ ID NO:592), comprising a polypeptide being at least 70%, optionally at least about 80%, preferably at least about 85%, more preferably at least about 90% and most preferably at least about 95% homologous to the sequence AMGVYGALTKAPVPGTPDSLSSGSSRDVQGTDASLDEELDRVKMS (SEQ ID NO:1540) in D11853_PEA_{—}1_P10 (SEQ ID NO:592).

[2093] Comparison report between D11853_PEA_{—}1_P10 (SEQ ID NO:592) and Q96FY2 (SEQ ID NO:638:

[2094] 1. An isolated chimeric polypeptide encoding for D11853_PEA_{—}1_P10 (SEQ ID NO:592) comprising a first amino acid sequence being at least 90% homologous to MLARAARGTGALLLRGSLLASGRAPRRASSGLPRNTVVLFVPQQEAWVVERMGRFHRI LEPGLNILIPVLDRIRYVQSLKEIVINVPEQSAVTLDNVTLQIDGVLYLRIMDPYKASYGV EDPEYAVTQ corresponding to amino acids 1-128 of Q96FY2 (SEQ ID NO:638), which also corresponds to amino acids 1-128 of D11853_PEA_{—}1_P10 (SEQ ID NO:592), a bridging amino acid L corresponding to amino acid 129 of D11853_PEA_{—}1_P10 (SEQ ID NO:592), a second amino acid sequence being at least 90% homologous to AQTTMRSELGKLSLDKVFRERESLNASIVDAINQAADCWGIRCLRYEIKDIHVPPRVKES MQMQVEAERRKRATVLESEGTRESAINVAEGKKQAQILASEAEKAEQINQAAGEASAV LAKAKAKAEAIRILAAALTQH corresponding to amino acids 130-268 of Q96FY2 (SEQ ID NO:638), which also corresponds to amino acids 130-268 of D11853_PEA_{—}1_P10 (SEQ ID NO:592), and a third amino acid sequence being at least 90% homologous to AMGVYGALTKAPVPGTPDSLSSGSSRDVQGTDASLDEELDRVKMS (SEQ ID NO:1540) corresponding to amino acids 312-356 of Q96FY2 (SEQ ID NO:638), which also corresponds to amino acids 269-313 of D11853_PEA_{—}1_P10 (SEQ ID NO:592), wherein said first amino acid sequence, bridging amino acid, second amino acid sequence and third amino acid sequence are contiguous and in a sequential order.

[2095] 2. An isolated chimeric polypeptide encoding for an edge portion of D11853_PEA_{—}1_P10 (SEQ ID NO:592), comprising a polypeptide having a length “n”, wherein n is at least about 10 amino acids in length, optionally at least about 20 amino acids in length, preferably at least about 30 amino acids in length, more preferably at least about 40 amino acids in length and most preferably at least about 50 amino acids in length, wherein at least two amino acids comprise HA, having a structure as follows: a sequence starting from any of amino acid numbers 268−x to 268; and ending at any of amino acid numbers 269+((n−2)−x), in which x varies from 0 to n−2.

[2096] Comparison report between D11853_PEA_{—}1_P10 (SEQ ID NO:592) and Q9UJZ1 (SEQ ID NO:637):

[2097] 1. An isolated chimeric polypeptide encoding for D11853_PEA_{—}1_P10 (SEQ ID NO:592), comprising a first amino acid sequence being at least 90% homologous to MLARAARGTGALLLRGSLLASGRAPRRASSGLPRNTVVLFVPQQEAWVVERMGRFHRI LEPGLNILIPVLDRIRYVQSLKEIVINVPEQSAVTLDNVTLQIDGVLYLRIMDPYKASYGV EDPEYAVTQLAQTTMRSELGKLSLDKVFRERESLNASIVDAINQAADCWGIRCLRYEIK DIHVPPRVKESMQMQVEAERRKRATVLESEGTRESAINVAEGKKQAQILASEAEKAEQI NQAAGEASAVLAKAKAKAEAIRILAAALTQH corresponding to amino acids 1-268 of Q9UJZ1 (SEQ ID NO:637), which also corresponds to amino acids 1-268 of D11853_PEA_{—}1_P10 (SEQ ID NO:592), and a second amino acid sequence being at least 90% homologous to AMGVYGALTKAPVPGTPDSLSSGSSRDVQGTDASLDEELDRVKMS (SEQ ID NO:1540) corresponding to amino acids 312-356 of Q9UJZ1 (SEQ ID NO:637), which also corresponds to amino acids 269-313 of D11853_PEA_{—}1_P10 (SEQ ID NO:592), wherein said first amino acid sequence and second amino acid sequence are contiguous and in a sequential order.

[2098] 2. An isolated chimeric polypeptide encoding for an edge portion of D11853_PEA_{—}1_P10 (SEQ ID NO:592), comprising a polypeptide having a length “n”, wherein n is at least about 10 amino acids in length, optionally at least about 20 amino acids in length, preferably at least about 30 amino acids in length, more preferably at least about 40 amino acids in length and most preferably at least about 50 amino acids in length, wherein at least two amino acids comprise HA, having a structure as follows: a sequence starting from any of amino acid numbers 268−x to 268; and ending at any of amino acid numbers 269+((n−2)−x), in which x varies from 0 to n−2.

[2099] The location of the variant protein was determined according to results from a number of different software programs and analyses, including analyses from SignalP and other specialized programs. The variant protein is believed to be located as follows with regard to the cell: secreted. The protein localization is believed to be secreted because one of the two signal-peptide prediction programs (HMM:Signal peptide,NN:NO) predicts that this protein has a signal peptide.

[2100] Variant protein D11853_PEA_{—}1_P10 (SEQ ID NO:592) also has the following non-silent SNPs (Single Nucleotide Polymorphisms) as listed in Table 14, (given according to their position(s) on the amino acid sequence, with the alternative amino acid(s) listed; the last column indicates whether the SNP is known or not; the presence of known SNPs in variant protein D11853_PEA_{—}1_P10 (SEQ ID NO:592) sequence provides support for the deduced sequence of this variant protein according to the present invention).

[2101] Variant protein D11853_PEA_{—}1_P10 (SEQ ID NO:592) is encoded by the following transcript(s): D11853_PEA_{—}1_T14 (SEQ ID NO:64), for which the sequence(s) is/are given at the end of the application. The coding portion of transcript D11853_PEA_{—}1_T14 (SEQ ID NO:64) is shown in bold; this coding portion starts at position 108 and ends at position 1046. The transcript also has the following SNPs as listed in Table 15 (given according to their position on the nucleotide sequence, with the alternative nucleic acid listed; the last column indicates whether the SNP is known or not; the presence of known SNPs in variant protein D11853_PEA_{—}1_P10 (SEQ ID NO:592) sequence provides support for the deduced sequence of this variant protein according to the present invention).

[2102] Variant protein D11853_PEA_{—}1_P11 (SEQ ID NO:593) according to the present invention has an amino acid sequence as given at the end of the application; it is encoded by transcript(s) D11853_PEA_{—}1_T15 (SEQ ID NO:65). An alignment is given to the known protein (Membrane associated protein SLP-2 (SEQ ID NO:637)) at the end of the application. One or more alignments to one or more previously published protein sequences are given at the end of the application. A brief description of the relationship of the variant protein according to the present invention to each such aligned protein is as follows:

[2103] Comparison report between D11853_PEA_{—}1_P11 (SEQ ID NO:593) and Q9P₀₄₂ (SEQ ID NO:639):

[2104] 1. An isolated chimeric polypeptide encoding for D11853_PEA_{—}1_P11 (SEQ ID NO:593) comprising a first amino acid sequence being at least 70%, optionally at least 80%, preferably at least 85%, more preferably at least 90% and most preferably at least 95% homologous to a polypeptide having the sequence MLARAARGTGALLLRGSLLASGRAPR (SEQ ID NO:1530) corresponding to amino acids 1-26 of D11853_PEA_{—}1_P11 (SEQ ID NO:593), a second amino acid sequence being at least 90% homologous to RASSGLPRNTVVLFVPQQEAWVVERMGRFHRILEPGLNILIPVLDRIRYVQSLKEIVINVP EQSAVTLDNVTLQIDGVLYLRIMDPYKASYGVEDPEYAVTQLAQTTMRSELGKLSLDK VFRERESLNASIVDAINQAADCWGIRCLRYEIKDIHVPPRVKESMQMQVEAERRKR corresponding to amino acids 13-187 of Q9P₀₄₂ (SEQ ID NO:639), which also corresponds to amino acids 27-201 of D11853_PEA_{—}1_P11 (SEQ ID NO:593), a bridging amino acid A corresponding to amino acid 202 of D11853_PEA_{—}1_P11 (SEQ ID NO:593), a third amino acid sequence being at least 90% homologous to TVLESEGTRESAINVAEGKKQAQILASEAEKAEQINQA corresponding to amino acids 189-226 of Q9P₀₄₂ (SEQ ID NO:639), which also corresponds to amino acids 203-240 of D11853_PEA_{—}1_P11 (SEQ ID NO:593), a fourth amino acid sequence being at least 70%, optionally at least 80%, preferably at least 85%, more preferably at least 90% and most preferably at least 95% homologous to a polypeptide having the sequence AGQERVEAEGGARHGPLKIGAGAGSLGYFDFMGQASSVPSL (SEQ ID NO:1538) corresponding to amino acids 241-281 of D11853_PEA_{—}1_P11 (SEQ ID NO:593), a fifth amino acid sequence being at least 90% homologous to AGEASAVLAKAKAKAEAIRILAAALTQH corresponding to amino acids 227-254 of Q9P₀₄₂ (SEQ ID NO:639), which also corresponds to amino acids 282-309 of D11853_PEA_{—}1_P11 (SEQ ID NO:593), and a sixth amino acid sequence being at least 70%, optionally at least 80%, preferably at least 85%, more preferably at least 90% and most preferably at least 95% homologous to a polypeptide having the sequence VRGPWVGMGTGIDSGRGSLIYA (SEQ ID NO:1535) corresponding to amino acids 310-331 of D11853_PEA_{—}1_P11 (SEQ ID NO:593), wherein said first amino acid sequence, second amino acid sequence, bridging amino acid, third amino acid sequence, fourth amino acid sequence, fifth amino acid sequence and sixth amino acid sequence are contiguous and in a sequential order.

[2105] 2. An isolated polypeptide encoding for a head of D11853_PEA_{—}1_P11 (SEQ ID NO:593), comprising a polypeptide being at least 70%, optionally at least about 80%, preferably at least about 85%, more preferably at least about 90% and most preferably at least about 95% homologous to the sequence MLARAARGTGALLLRGSLLASGRAPR (SEQ ID NO:1530) of D11853_PEA_{—}1_P11 (SEQ ID NO:593).

[2106] 3. An isolated polypeptide encoding for an edge portion of D11853_PEA_{—}1_P11 (SEQ ID NO:593), comprising an amino acid sequence being at least 70%, optionally at least about 80%, preferably at least about 85%, more preferably at least about 90% and most preferably at least about 95% homologous to the sequence encoding for AGQERVEAEGGARHGPLKIGAGAGSLGYFDFMGQASSVPSL (SEQ ID NO:1538), corresponding to D11853_PEA_{—}1_P11 (SEQ ID NO:593).

[2107] 4. An isolated polypeptide encoding for a tail of D11853_PEA_{—}1_P11 (SEQ ID NO:593), comprising a polypeptide being at least 70%, optionally at least about 80%, preferably at least about 85%, more preferably at least about 90% and most preferably at least about 95% homologous to the sequence VRGPWVGMGTGIDSGRGSLIYA (SEQ ID NO:1535) in D11853_PEA_{—}1_P11 (SEQ ID NO:593).

[2108] Comparison report between D11853_PEA_{—}1_P11 (SEQ ID NO:593) and BAC85377 (SEQ ID NO:640):

[2109] 1. An isolated chimeric polypeptide encoding for D11853_PEA_{—}1_P11 (SEQ ID NO:593), comprising a first amino acid sequence being at least 70%, optionally at least 80%, preferably at least 85%, more preferably at least 90% and most preferably at least 95% homologous to a polypeptide having the sequence MLARAARGTGALLLRGSLLASGRAPRRASSGLPRNTVVLFVPQQEAWVVERMGRFHRI LEPGLNILIPVLDRIRYVQSLKEIVINVPEQSAVTLDNVTLQIDGVLYLRI corresponding to amino acids 1-109 of D11853_PEA_{—}1_P11 (SEQ ID NO:593), a second amino acid sequence being at least 90% homologous to MDPYKASYGVEDPEYAVTQLAQTTMRSELGKLSLDKVFRERESLNASIVDAINQAADC WGIRCLRYEIKDIHVPPRVKESMQMQVEAERRKRATVLESEGTRESAINVAEGKKQAQI LASEAEKAEQINQA corresponding to amino acids 1-131 of BAC85377 (SEQ ID NO:640), which also corresponds to amino acids 110-240 of D11853_PEA_{—}1_P11 (SEQ ID NO:593), a third amino acid sequence being at least 70%, optionally at least 80%, preferably at least 85%, more preferably at least 90% and most preferably at least 95% homologous to a polypeptide having the sequence AGQERVEAEGGARHGPLKIGAGAGSLGYFDFMGQASSVPSL (SEQ ID NO:1538) corresponding to amino acids 241-281 of D11853_PEA_{—}1_P11 (SEQ ID NO:593), and a fourth amino acid sequence being at least 90% homologous to AGEASAVLAKAKAKAEAIRILAAALTQHVRGPWVGMGTGIDSGRGSLIYA corresponding to amino acids 132-181 of BAC85377 (SEQ ID NO:640), which also corresponds to amino acids 282-331 of D11853_PEA_{—}1_P11 (SEQ ID NO:593), wherein said first amino acid sequence, second amino acid sequence, third amino acid sequence and fourth amino acid sequence are contiguous and in a sequential order.

[2110] 2. An isolated polypeptide encoding for a head of D11853_PEA_{—}1_P11 (SEQ ID NO:593), comprising a polypeptide being at least 70%, optionally at least about 80%, preferably at least about 85%, more preferably at least about 90% and most preferably at least about 95% homologous to the sequence MLARAARGTGALLLRGSLLASGRAPRRASSGLPRNTVVLFVPQQEAWVVERMGRFHRI LEPGLNILIPVLDRIRYVQSLKEIVINVPEQSAVTLDNVTLQIDGVLYLRI of D11853_PEA_{—}1_P11 (SEQ ID NO:593).

[2111] 3. An isolated polypeptide encoding for an edge portion of D11853_PEA_{—}1_P11 (SEQ ID NO:593), comprising an amino acid sequence being at least 70%, optionally at least about 80%, preferably at least about 85%, more preferably at least about 90% and most preferably at least about 95% homologous to the sequence encoding for AGQERVEAEGGARHGPLKIGAGAGSLGYFDFMGQASSVPSL (SEQ ID NO:1538), corresponding to D11853_PEA_{—}1_P11 (SEQ ID NO:593).

[2112] Comparison report between D11853_PEA_{—}1_P11 (SEQ ID NO:593) and Q96FY2 (SEQ ID NO:638):

[2113] 1. An isolated chimeric polypeptide encoding for D11853_PEA_{—}1_P11 (SEQ ID NO:593) comprising a first amino acid sequence being at least 90% homologous to MLARAARGTGALLLRGSLLASGRAPRRASSGLPRNTVVLFVPQQEAWVVERMGRFHRI LEPGLNILIPVLDRIRYVQSLKEIVINVPEQSAVTLDNVTLQIDGVLYLRIMDPYKASYGV EDPEYAVTQ corresponding to amino acids 1-128 of Q96FY2 (SEQ ID NO:638), which also corresponds to amino acids 1-128 of D11853_PEA_{—}1_P11 (SEQ ID NO:593), a bridging amino acid L corresponding to amino acid 129 of D11853_PEA_{—}1_P11 (SEQ ID NO:593), a second amino acid sequence being at least 90% homologous to AQTTMRSELGKLSLDKVFRERESLNASIVDAINQAADCWGIRCLRYEIKDIHVPPRVKES MQMQVEAERRKRATVLESEGTRESAINVAEGKKQAQILASEAEKAEQINQA corresponding to amino acids 130-240 of Q96FY2 (SEQ ID NO:638), which also corresponds to amino acids 130-240 of D11853_PEA_{—}1_P11 (SEQ ID NO:593), a third amino acid sequence being at least 70%, optionally at least 80%, preferably at least 85%, more preferably at least 90% and most preferably at least 95% homologous to a polypeptide having the sequence AGQERVEAEGGARHGPLKIGAGAGSLGYFDFMGQASSVPSL (SEQ ID NO:1538) corresponding to amino acids 241-281 of D11853_PEA_{—}1_P11 (SEQ ID NO:593), a fourth amino acid sequence being at least 90% homologous to AGEASAVLAKAKAKAEAIRILAAALTQH corresponding to amino acids 241-268 of Q96FY2 (SEQ ID NO:638), which also corresponds to amino acids 282-309 of D11853_PEA_{—}1_P11 (SEQ ID NO:593), and a fifth amino acid sequence being at least 70%, optionally at least 80%, preferably at least 85%, more preferably at least 90% and most preferably at least 95% homologous to a polypeptide having the sequence VRGPWVGMGTGIDSGRGSLIYA (SEQ ID NO:1535) corresponding to amino acids 310-331 of D11853_PEA_{—}1_P11 (SEQ ID NO:593), wherein said first amino acid sequence, bridging amino acid, second amino acid sequence, third amino acid sequence, fourth amino acid sequence and fifth amino acid sequence are contiguous and in a sequential order.

[2114] 2. An isolated polypeptide encoding for an edge portion of D11853_PEA_{—}1_P11 (SEQ ID NO:593), comprising an amino acid sequence being at least 70%, optionally at least about 80%, preferably at least about 85%, more preferably at least about 90% and most preferably at least about 95% homologous to the sequence encoding for AGQERVEAEGGARHGPLKIGAGAGSLGYFDFMGQASSVPSL (SEQ ID NO:1538), corresponding to D11853_PEA_{—}1_P11 (SEQ ID NO:593).

[2115] 3. An isolated polypeptide encoding for a tail of D11853_PEA_{—}1_P11 (SEQ ID NO:593), comprising a polypeptide being at least 70%, optionally at least about 80%, preferably at least about 85%, more preferably at least about 90% and most preferably at least about 95% homologous to the sequence VRGPWVGMGTGIDSGRGSLIYA (SEQ ID NO:1535) in D11853_PEA_{—}1_P11 (SEQ ID NO:593).

[2116] Comparison report between D11853_PEA_{—}1_P11 (SEQ ID NO:593) and Q9UJZ1 (SEQ ID NO:637):

[2117] 1. An isolated chimeric polypeptide encoding for D11853_PEA_{—}1_P11 (SEQ ID NO:593) comprising a first amino acid sequence being at least 90% homologous to MLARAARGTGALLLRGSLLASGRAPRRASSGLPRNTVVLFVPQQEAWVVERMGRFHRI LEPGLNILIPVLDRIRYVQSLKEIVINVPEQSAVTLDNVTLQIDGVLYLRIMDPYKASYGV EDPEYAVTQLAQTTMRSELGKLSLDKVFRERESLNASIVDAINQAADCWGIRCLRYEIK DIHVPPRVKESMQMQVEAERRKRATVLESEGTRESAINVAEGKKQAQILASEAEKAEQI NQA corresponding to amino acids 1-240 of Q9UJZ1 (SEQ ID NO:637), which also corresponds to amino acids 1-240 of D11853_PEA_{—}1_P11 (SEQ ID NO:593), a second amino acid sequence being at least 70%, optionally at least 80%, preferably at least 85%, more preferably at least 90% and most preferably at least 95% homologous to a polypeptide having the sequence AGQERVEAEGGARHGPLKIGAGAGSLGYFDFMGQASSVPSL (SEQ ID NO:1538) corresponding to amino acids 241-281 of D11853_PEA_{—}1_P11 (SEQ ID NO:593), a third amino acid sequence being at least 90% homologous to AGEASAVLAKAKAKAEAIRILAAALTQH corresponding to amino acids 241-268 of Q9UJZ1 (SEQ ID NO:637), which also corresponds to amino acids 282-309 of D11853_PEA_{—}1_P11 (SEQ ID NO:593), and a fourth amino acid sequence being at least 70%, optionally at least 80%, preferably at least 85%, more preferably at least 90% and most preferably at least 95% homologous to a polypeptide having the sequence VRGPWVGMGTGIDSGRGSLIYA (SEQ ID NO:1535) corresponding to amino acids 310-331 of D11853_PEA_{—}1_P11 (SEQ ID NO:593), wherein said first amino acid sequence, second amino acid sequence, third amino acid sequence and fourth amino acid sequence are contiguous and in a sequential order.

[2118] 2. An isolated polypeptide encoding for an edge portion of D11853_PEA_{—}1_P11 (SEQ ID NO:593), comprising an amino acid sequence being at least 70%, optionally at least about 80%, preferably at least about 85%, more preferably at least about 90% and most preferably at least about 95% homologous to the sequence encoding for AGQERVEAEGGARHGPLKIGAGAGSLGYFDFMGQASSVPSL (SEQ ID NO:1538), corresponding to D11853_PEA_{—}1_P11 (SEQ ID NO:593).

[2119] 3. An isolated polypeptide encoding for a tail of D11853_PEA_{—}1_P11 (SEQ ID NO:593), comprising a polypeptide being at least 70%, optionally at least about 80%, preferably at least about 85%, more preferably at least about 90% and most preferably at least about 95% homologous to the sequence VRGPWVGMGTGIDSGRGSLIYA (SEQ ID NO:1535) in D11853_PEA_{—}1_P11 (SEQ ID NO:593).

[2120] The location of the variant protein was determined according to results from a number of different software programs and analyses, including analyses from SignalP and other specialized programs. The variant protein is believed to be located as follows with regard to the cell: secreted. The protein localization is believed to be secreted because one of the two signal-peptide prediction programs (HMM:Signal peptide,NN:NO) predicts that this protein has a signal peptide.

[2121] Variant protein D11853_PEA_{—}1_P11 (SEQ ID NO:593) also has the following non-silent SNPs (Single Nucleotide Polymorphisms) as listed in Table 16, (given according to their position(s) on the amino acid sequence, with the alternative amino acid(s) listed; the last column indicates whether the SNP is known or not; the presence of known SNPs in variant protein D11853_PEA_{—}1_P11 (SEQ ID NO:593) sequence provides support for the deduced sequence of this variant protein according to the present invention).

[2122] Variant protein D11853_PEA_{—}1_P11 (SEQ ID NO:593) is encoded by the following transcript(s): D11853_PEA_{—}1_T15 (SEQ ID NO:65), for which the sequence(s) is/are given at the end of the application. The coding portion of transcript D11853_PEA_{—}1_T15 (SEQ ID NO:65) is shown in bold; this coding portion starts at position 108 and ends at position 1100. The transcript also has the following SNPs as listed in Table 17 (given according to their position on the nucleotide sequence, with the alternative nucleic acid listed; the last column indicates whether the SNP is known or not; the presence of known SNPs in variant protein D11853_PEA_{—}1_P11 (SEQ ID NO:593) sequence provides support for the deduced sequence of this variant protein according to the present invention).

[2123] Variant protein D11853_PEA_{—}1_P12 (SEQ ID NO:594) according to the present invention has an amino acid sequence as given at the end of the application; it is encoded by transcript(s) D11853_PEA_{—}1_T16 (SEQ ID NO:66). An alignment is given to the known protein (Membrane associated protein SLP-2 (SEQ ID NO:637)) at the end of the application. One or more alignments to one or more previously published protein sequences are given at the end of the application. A brief description of the relationship of the variant protein according to the present invention to each such aligned protein is as follows:

[2124] Comparison report between D11853_PEA_{—}1_P12 (SEQ ID NO:594) and Q9P₀₄₂ (SEQ ID NO:639):

[2125] 1. An isolated chimeric polypeptide encoding for D11853_PEA_{—}1_P12 (SEQ ID NO:594), comprising a first amino acid sequence being at least 70%, optionally at least 80%, preferably at least 85%, more preferably at least 90% and most preferably at least 95% homologous to a polypeptide having the sequence MLARAARGTGALLLRGSLLASGRAPR (SEQ ID NO:1530) corresponding to amino acids 1-26 of D11853_PEA_{—}1_P12 (SEQ ID NO:594), a second amino acid sequence being at least 90% homologous to RASSGLPRNTVVLFVPQQEAWVVERMGRFHRILEPGLNILIPVLDRIRYVQSLKEIVINVP EQSAVTLDNVTLQIDGVLYLRIMDPYKASYGVEDPEYAVTQLAQTTMRSELGKLSLDK VFR corresponding to amino acids 13-134 of Q9P₀₄₂ (SEQ ID NO:639), which also corresponds to amino acids 27-148 of D11853_PEA_{—}1_P12 (SEQ ID NO:594), and a third amino acid sequence being at least 70%, optionally at least 80%, preferably at least 85%, more preferably at least 90% and most preferably at least 95% homologous to a polypeptide having the sequence VSRSEPELGFEDTNLTLLIFSEGQDQSQALLSVGP (SEQ ID NO:1545) corresponding to amino acids 149-183 of D11853_PEA_{—}1_P12 (SEQ ID NO:594), wherein said first amino acid sequence, second amino acid sequence and third amino acid sequence are contiguous and in a sequential order.

[2126] 2. An isolated polypeptide encoding for a head of D11853_PEA_{—}1_P12 (SEQ ID NO:594), comprising a polypeptide being at least 70%, optionally at least about 80%, preferably at least about 85%, more preferably at least about 90% and most preferably at least about 95% homologous to the sequence MLARAARGTGALLLRGSLLASGRAPR (SEQ ID NO:1530) of D11853_PEA_{—}1_P12 (SEQ ID NO:594).

[2127] 3. An isolated polypeptide encoding for a tail of D11853_PEA_{—}1_P12 (SEQ ID NO:594), comprising a polypeptide being at least 70%, optionally at least about 80%, preferably at least about 85%, more preferably at least about 90% and most preferably at least about 95% homologous to the sequence VSRSEPELGFEDTNLTLLIFSEGQDQSQALLSVGP (SEQ ID NO:1545) in D11853_PEA_{—}1_P12(SEQ ID NO:594).

[2128] Comparison report between D11853_PEA_{—}1_P12 (SEQ ID NO:594) and Q96FY2 (SEQ ID NO:638):

[2129] 1. An isolated chimeric polypeptide encoding for D11853_PEA_{—}1_P12 (SEQ ID NO:594) comprising a first amino acid sequence being at least 90% homologous to MLARAARGTGALLLRGSLLASGRAPRRASSGLPRNTVVLFVPQQEAWVVERMGRFHRI LEPGLNILIPVLDRIRYVQSLKEIVINVPEQSAVTLDNVTLQIDGVLYLRIMDPYKASYGV EDPEYAVTQ corresponding to amino acids 1-128 of Q96FY2 (SEQ ID NO:638), which also corresponds to amino acids 1-128 of D11853_PEA_{—}1_P12 (SEQ ID NO:594), a bridging amino acid L corresponding to amino acid 129 of D11853_PEA_{—}1_P12 (SEQ ID NO:594), a second amino acid sequence being at least 90% homologous to AQTTMRSELGKLSLDKVFR corresponding to amino acids 130-148 of Q96FY2 (SEQ ID NO:638), which also corresponds to amino acids 130-148 of D11853_PEA_{—}1_P12 (SEQ ID NO:594), and a third amino acid sequence being at least 70%, optionally at least 80%, preferably at least 85%, more preferably at least 90% and most preferably at least 95% homologous to a polypeptide having the sequence VSRSEPELGFEDTNLTLLIFSEGQDQSQALLSVGP (SEQ ID NO:1545) corresponding to amino acids 149-183 of D11853_PEA_{—}1_P12 (SEQ ID NO:594), wherein said first amino acid sequence, bridging amino acid, second amino acid sequence and third amino acid sequence are contiguous and in a sequential order.

[2130] 2. An isolated polypeptide encoding for a tail of D11853_PEA_{—}1_P12 (SEQ ID NO:594), comprising a polypeptide being at least 70%, optionally at least about 80%, preferably at least about 85%, more preferably at least about 90% and most preferably at least about 95% homologous to the sequence VSRSEPELGFEDTNLTLLIFSEGQDQSQALLSVGP (SEQ ID NO:1545) in D11853_PEA_{—}1_P12 (SEQ ID NO:594).

[2131] Comparison report between D11853_PEA_{—}1_P12 (SEQ ID NO:594) and Q9UJZ1 (SEQ ID NO:637):

[2132] 1. An isolated chimeric polypeptide encoding for D11853_PEA_{—}1_P12 (SEQ ID NO:594), comprising a first amino acid sequence being at least 90% homologous to MLARAARGTGALLLRGSLLASGRAPRRASSGLPRNTVVLFVPQQEAWVVERMGRFHRI LEPGLNILIPVLDRIRYVQSLKEIVINVPEQSAVTLDNVTLQIDGVLYLRIMDPYKASYGV EDPEYAVTQLAQTTMRSELGKLSLDKVFR corresponding to amino acids 1-148 of Q9UJZ1 (SEQ ID NO:637), which also corresponds to amino acids 1-148 of D11853_PEA_{—}1_P12 (SEQ ID NO:594), and a second amino acid sequence being at least 70%, optionally at least 80%, preferably at least 85%, more preferably at least 90% and most preferably at least 95% homologous to a polypeptide having the sequence VSRSEPELGFEDTNLTLLIFSEGQDQSQALLSVGP (SEQ ID NO:1545) corresponding to amino acids 149-183 of D11853_PEA_{—}1_P12 (SEQ ID NO:594), wherein said first amino acid sequence and second amino acid sequence are contiguous and in a sequential order.

[2133] 2. An isolated polypeptide encoding for a tail of D11853_PEA_{—}1_P12 (SEQ ID NO:594), comprising a polypeptide being at least 70%, optionally at least about 80%, preferably at least about 85%, more preferably at least about 90% and most preferably at least about 95% homologous to the sequence VSRSEPELGFEDTNLTLLIFSEGQDQSQALLSVGP (SEQ ID NO:1545) in D11853_PEA_{—}1_P12 (SEQ ID NO:594).

[2134] The location of the variant protein was determined according to results from a number of different software programs and analyses, including analyses from SignalP and other specialized programs. The variant protein is believed to be located as follows with regard to the cell: secreted. The protein localization is believed to be secreted because one of the two signal-peptide prediction programs (HMM:Signal peptide,NN:NO) predicts that this protein has a signal peptide.

[2135] Variant protein D11853_PEA_{—}1_P12 (SEQ ID NO:594) is encoded by the following transcript(s): D11853_PEA_{—}1_T16 (SEQ ID NO:66, for which the sequence(s) is/are given at the end of the application. The coding portion of transcript D11853_PEA_{—}1_T16 (SEQ ID NO:66) is shown in bold; this coding portion starts at position 108 and ends at position 656. The transcript also has the following SNPs as listed in Table 18 (given according to their position on the nucleotide sequence, with the alternative nucleic acid listed; the last column indicates whether the SNP is known or not; the presence of known SNPs in variant protein D11853_PEA_{—}1_P12 (SEQ ID NO:594) sequence provides support for the deduced sequence of this variant protein according to the present invention).

[2136] Variant protein D11853_PEA_{—}1_P14 (SEQ ID NO:595) according to the present invention has an amino acid sequence as given at the end of the application; it is encoded by transcript(s) D11853_PEA_{—}1_T19 (SEQ ID NO:68). An alignment is given to the known protein (Membrane associated protein SLP-2 (SEQ ID NO:637)) at the end of the application. One or more alignments to one or more previously published protein sequences are given at the end of the application. A brief description of the relationship of the variant protein according to the present invention to each such aligned protein is as follows:

[2137] Comparison report between D11853_PEA_{—}1_P14 (SEQ ID NO:595) and Q9P₀₄₂ (SEQ ID NO:639):

[2138] 1. An isolated chimeric polypeptide encoding for D11853_PEA_{—}1_P14 (SEQ ID NO:595) comprising a first amino acid sequence being at least 70%, optionally at least 80%, preferably at least 85%, more preferably at least 90% and most preferably at least 95% homologous to a polypeptide having the sequence MLARAARGTGALLLRGSLLASGRAPR (SEQ ID NO:1530) corresponding to amino acids 1-26 of D11853_PEA_{—}1_P14 (SEQ ID NO:595), a second amino acid sequence being at least 90% homologous to RASSGLPRNTVVLFVPQQEAWVVERMGRFHRILEPGLNILIPVLDRIRYVQSLKEIVINVP EQSAVTLDNVTLQIDGVLYLRIMDPYKASYGVEDPEYAVTQLAQTTMRSELGKLSLDK VFRERESLNASIVDAINQAADCWGIRCLRYEIKDIHVPPRVKESMQMQV corresponding to amino acids 13-180 of Q9P₀₄₂ (SEQ ID NO:639), which also corresponds to amino acids 27-194 of D11853_PEA_{—}1_P14 (SEQ ID NO:595), and a third amino acid sequence being at least 70%, optionally at least 80%, preferably at least 85%, more preferably at least 90% and most preferably at least 95% homologous to a polypeptide having the sequence GAKEGWEKGLRAPVPGGSRLPSCYDG (SEQ ID NO:1547) corresponding to amino acids 195-220 of D11853_PEA_{—}1_P14 (SEQ ID NO:595), wherein said first amino acid sequence, second amino acid sequence and third amino acid sequence are contiguous and in a sequential order.

[2139] 2. An isolated polypeptide encoding for a head of D11853_PEA_{—}1_P14 (SEQ ID NO:595), comprising a polypeptide being at least 70%, optionally at least about 80%, preferably at least about 85%, more preferably at least about 90% and most preferably at least about 95% homologous to the sequence MLARAARGTGALLLRGSLLASGRAPR (SEQ ID NO:1530) of D11853_PEA_{—}1_P14 (SEQ ID NO:595).

[2140] 3. An isolated polypeptide encoding for a tail of D11853_PEA_{—}1_P14 (SEQ ID NO:595), comprising a polypeptide being at least 70%, optionally at least about 80%, preferably at least about 85%, more preferably at least about 90% and most preferably at least about 95% homologous to the sequence GAKEGWEKGLRAPVPGGSRLPSCYDG (SEQ ID NO:1547) in D11853_PEA_{—}1_P14 (SEQ ID NO:595).

[2141] Comparison report between D11853_PEA_{—}1_P14 (SEQ ID NO:595) and Q96FY2 (SEQ ID NO:638):

[2142] 1. An isolated chimeric polypeptide encoding for D11853_PEA_{—}1_P14 (SEQ ID NO:595) comprising a first amino acid sequence being at least 90% homologous to MLARAARGTGALLLRGSLLASGRAPRRASSGLPRNTVVLFVPQQEAWVVERMGRFHRI LEPGLNILIPVLDRIRYVQSLKEIVINVPEQSAVTLDNVTLQIDGVLYLRIMDPYKASYGV EDPEYAVTQ corresponding to amino acids 1-128 of Q96FY2 (SEQ ID NO:638), which also corresponds to amino acids 1-128 of D11853_PEA_{—}1_P14 (SEQ ID NO:595), a bridging amino acid L corresponding to amino acid 129 of D11853_PEA_{—}1_P14 (SEQ ID NO:595), a second amino acid sequence being at least 90% homologous to AQTTMRSELGKLSLDKVFRERESLNASIVDAINQAADCWGIRCLRYEIKDIHVPPRVKES MQMQV corresponding to amino acids 130-194 of Q96FY2 (SEQ ID NO:638), which also corresponds to amino acids 130-194 of D11853_PEA_{—}1_P14 (SEQ ID NO:595), and a third amino acid sequence being at least 70%, optionally at least 80%, preferably at least 85%, more preferably at least 90% and most preferably at least 95% homologous to a polypeptide having the sequence GAKEGWEKGLRAPVPGGSRLPSCYDG (SEQ ID NO:1547) corresponding to amino acids 195-220 of D11853_PEA_{—}1_P14 (SEQ ID NO:595), wherein said first amino acid sequence, bridging amino acid, second amino acid sequence and third amino acid sequence are contiguous and in a sequential order.

[2143] 2. An isolated polypeptide encoding for a tail of D11853_PEA_{—}1_P14 (SEQ ID NO:595), comprising a polypeptide being at least 70%, optionally at least about 80%, preferably at least about 85%, more preferably at least about 90% and most preferably at least about 95% homologous to the sequence GAKEGWEKGLRAPVPGGSRLPSCYDG (SEQ ID NO:1547) in D11853_PEA_{—}1_P14 (SEQ ID NO:595).

[2144] Comparison report between D11853_PEA_{—}1_P14 (SEQ ID NO:595) and Q9UJZ1 (SEQ ID NO:637):

[2145] 1. An isolated chimeric polypeptide encoding for D11853_PEA_{—}1_P14 (SEQ ID NO:595) comprising a first amino acid sequence being at least 90% homologous to MLARAARGTGALLLRGSLLASGRAPRRASSGLPRNTVVLFVPQQEAWVVERMGRFHRI LEPGLNILIPVLDRIRYVQSLKEIVINVPEQSAVTLDNVTLQIDGVLYLRIMDPYKASYGV EDPEYAVTQLAQTTMRSELGKLSLDKVFRERESLNASIVDAINQAADCWGIRCLRYEIK DIHVPPRVKESMQMQV corresponding to amino acids 1-194 of Q9UJZ1 (SEQ ID NO:637) which also corresponds to amino acids 1-194 of D11853_PEA_{—}1_P14 (SEQ ID NO:595) and a second amino acid sequence being at least 70%, optionally at least 80%, preferably at least 85%, more preferably at least 90% and most preferably at least 95% homologous to a polypeptide having the sequence GAKEGWEKGLRAPVPGGSRLPSCYDG (SEQ ID NO:1547) corresponding to amino acids 195-220 of D11853_PEA_{—}1_P14 (SEQ ID NO:595), wherein said first amino acid sequence and second amino acid sequence are contiguous and in a sequential order.

[2146] 2. An isolated polypeptide encoding for a tail of D11853_PEA_{—}1_P14 (SEQ ID NO:595), comprising a polypeptide being at least 70%, optionally at least about 80%, preferably at least about 85%, more preferably at least about 90% and most preferably at least about 95% homologous to the sequence GAKEGWEKGLRAPVPGGSRLPSCYDG (SEQ ID NO:1547) in D11853_PEA_{—}1_P14 (SEQ ID NO:595).

[2147] The location of the variant protein was determined according to results from a number of different software programs and analyses, including analyses from SignalP and other specialized programs. The variant protein is believed to be located as follows with regard to the cell: secreted. The protein localization is believed to be secreted because one of the two signal-peptide prediction programs (HMM:Signal peptide,NN:NO) predicts that this protein has a signal peptide.

[2148] Variant protein D11853_PEA_{—}1_P14 (SEQ ID NO:595) also has the following non-silent SNPs (Single Nucleotide Polymorphisms) as listed in Table 19, (given according to their position(s) on the amino acid sequence, with the alternative amino acid(s) listed; the last column indicates whether the SNP is known or not; the presence of known SNPs in variant protein D11853_PEA_{—}1_P14 (SEQ ID NO:595) sequence provides support for the deduced sequence of this variant protein according to the present invention).

[2149] Variant protein D11853_PEA_{—}1_P14 (SEQ ID NO:595) is encoded by the following transcript(s): D11853_PEA_{—}1_T19 (SEQ ID NO:68, for which the sequence(s) is/are given at the end of the application. The coding portion of transcript D11853_PEA_{—}1_T19 (SEQ ID NO:68) is shown in bold; this coding portion starts at position 108 and ends at position 767. The transcript also has the following SNPs as listed in Table 20 (given according to their position on the nucleotide sequence, with the alternative nucleic acid listed; the last column indicates whether the SNP is known or not; the presence of known SNPs in variant protein D11853_PEA_{—}1_P14 (SEQ ID NO:595) sequence provides support for the deduced sequence of this variant protein according to the present invention).

[2150] Variant protein D11853_PEA_{—}1_P16 (SEQ ID NO:596) according to the present invention has an amino acid sequence as given at the end of the application; it is encoded by transcript(s) D11853_PEA_{—}1_T24 (SEQ ID NO:71). An alignment is given to the known protein (Membrane associated protein SLP-2 (SEQ ID NO:637)) at the end of the application. One or more alignments to one or more previously published protein sequences are given at the end of the application. A brief description of the relationship of the variant protein according to the present invention to each such aligned protein is as follows:

[2151] Comparison report between D11853_PEA_{—}1_P16 (SEQ ID NO:596) and Q9P₀₄₂ (SEQ ID NO:639):

[2152] 1. An isolated chimeric polypeptide encoding for D11853_PEA_{—}1_P16 (SEQ ID NO:596) comprising a first amino acid sequence being at least 70%, optionally at least 80%, preferably at least 85%, more preferably at least 90% and most preferably at least 95% homologous to a polypeptide having the sequence MLARAARGTGALLLRGSLLASGRAPR (SEQ ID NO:1530) corresponding to amino acids 1-26 of D11853_PEA_{—}1_P16 (SEQ ID NO:596), a second amino acid sequence being at least 90% homologous to RASSGLPRNTVVLFVPQQEAWVVERMGRFHRILEPGLNILIPVLDRIRYVQSLKEIVINVP EQSAVTLDNVTLQIDGVLYLRIMDPYKASYGVEDPEYAVTQLAQTTMRSELGKLSLDK VFR corresponding to amino acids 13-134 of Q9P₀₄₂ (SEQ ID NO:639), which also corresponds to amino acids 27-148 of D11853_PEA_{—}1_P16 (SEQ ID NO:596), a third amino acid sequence being at least 90% homologous to VEAERRKR corresponding to amino acids 180-187 of Q9P₀₄₂ (SEQ ID NO:639), which also corresponds to amino acids 149-156 of D11853_PEA_{—}1_P16 (SEQ ID NO:596), a bridging amino acid A corresponding to amino acid 157 of D11853_PEA_{—}1_P16 (SEQ ID NO:596), and a fourth amino acid sequence being at least 90% homologous to TVLESEGTRESAINVAEGKKQAQILASEAEKAEQINQAAGEASAVLAKAKAKAEAIRIL AAALTQHNGDAAASLTVAEQYVSAFSKLAKDSNTILLPSNPGDVTSMVAQAMGVYGA LTKAPVPGTPDSLSSGSSRDVQGTDASLDEELDRVKMS corresponding to amino acids 189-342 of Q9P₀₄₂ (SEQ ID NO:639), which also corresponds to amino acids 158-311 of D11853_PEA_{—}1_P16 (SEQ ID NO:596), wherein said first amino acid sequence, second amino acid sequence, third amino acid sequence, bridging amino acid and fourth amino acid sequence are contiguous and in a sequential order.

[2153] 2. An isolated polypeptide encoding for a head of D11853_PEA_{—}1_P16 (SEQ ID NO:596) comprising a polypeptide being at least 70%, optionally at least about 80%, preferably at least about 85%, more preferably at least about 90% and most preferably at least about 95% homologous to the sequence MLARAARGTGALLLRGSLLASGRAPR (SEQ ID NO:1530) of D11853_PEA_{—}1_P16 (SEQ ID NO:596).

[2154] 3. An isolated chimeric polypeptide encoding for an edge portion of D11853_PEA_{—}1_P16 (SEQ ID NO:596), comprising a polypeptide having a length “n”, wherein n is at least about 10 amino acids in length, optionally at least about 20 amino acids in length, preferably at least about 30 amino acids in length, more preferably at least about 40 amino acids in length and most preferably at least about 50 amino acids in length, wherein at least two amino acids comprise RV, having a structure as follows: a sequence starting from any of amino acid numbers 148−x to 148; and ending at any of amino acid numbers 149+((n−2)−x), in which x varies from 0 to n−2.

[2155] Comparison report between D11853_PEA_{—}1_P16 (SEQ ID NO:596) and BAC85377 (SEQ ID NO:640):

[2156] 1. An isolated chimeric polypeptide encoding for D11853_PEA_{—}1_P16 (SEQ ID NO:596) comprising a first amino acid sequence being at least 70%, optionally at least 80%, preferably at least 85%, more preferably at least 90% and most preferably at least 95% homologous to a polypeptide having the sequence MLARAARGTGALLLRGSLLASGRAPRRASSGLPRNTVVLFVPQQEAWVVERMGRFHRI LEPGLNILIPVLDRIRYVQSLKEIVINVPEQSAVTLDNVTLQIDGVLYLRI corresponding to amino acids 1-109 of D11853_PEA_{—}1_P16 (SEQ ID NO:596), a second amino acid sequence being at least 90% homologous to MDPYKASYGVEDPEYAVTQLAQTTMRSELGKLSLDKVFR corresponding to amino acids 1-39 of BAC85377 (SEQ ID NO:640), which also corresponds to amino acids 110-148 of D11853_PEA_{—}1_P16 (SEQ ID NO:596), a third amino acid sequence being at least 90% homologous to VEAERRKRATVLESEGTRESAINVAEGKKQAQILASEAEKAEQINQAAGEASAVLAKA KAKAEAIRILAAALTQH corresponding to amino acids 85-159 of BAC85377 (SEQ ID NO:640), which also corresponds to amino acids 149-223 of D11853_PEA_{—}1_P16 (SEQ ID NO:596), and a fourth amino acid sequence being at least 70%, optionally at least 80%, preferably at least 85%, more preferably at least 90% and most preferably at least 95% homologous to a polypeptide having the sequence NGDAAASLTVAEQYVSAFSKLAKDSNTILLPSNPGDVTSMVAQAMGVYGALTKAPVP GTPDSLSSGSSRDVQGTDASLDEELDRVKMS (SEQ ID NO:1531) corresponding to amino acids 224-311 of D11853_PEA_{—}1_P16 (SEQ ID NO:596), wherein said first amino acid sequence, second amino acid sequence, third amino acid sequence and fourth amino acid sequence are contiguous and in a sequential order.

[2157] 2. An isolated polypeptide encoding for a head of D11853_PEA_{—}1_P16 (SEQ ID NO:596), comprising a polypeptide being at least 70%, optionally at least about 80%, preferably at least about 85%, more preferably at least about 90% and most preferably at least about 95% homologous to the sequence MLARAARGTGALLLRGSLLASGRAPRRASSGLPRNTVVLFVPQQEAWVVERMGRFHRI LEPGLNILIPVLDRIRYVQSLKEIVINVPEQSAVTLDNVTLQIDGVLYLRI of D11853_PEA_{—}1_P16 (SEQ ID NO:596).

[2158] 3. An isolated chimeric polypeptide encoding for an edge portion of D11853_PEA_{—}1_P16 (SEQ ID NO:596), comprising a polypeptide having a length “n”, wherein n is at least about 10 amino acids in length, optionally at least about 20 amino acids in length, preferably at least about 30 amino acids in length, more preferably at least about 40 amino acids in length and most preferably at least about 50 amino acids in length, wherein at least two amino acids comprise RV, having a structure as follows: a sequence starting from any of amino acid numbers 148−x to 148; and ending at any of amino acid numbers 149+((n−2)−x), in which x varies from 0 to n−2.

[2159] 4. An isolated polypeptide encoding for a tail of D11853_PEA_{—}1_P16 (SEQ ID NO:596), comprising a polypeptide being at least 70%, optionally at least about 80%, preferably at least about 85%, more preferably at least about 90% and most preferably at least about 95% homologous to the sequence NGDAAASLTVAEQYVSAFSKLAKDSNTILLPSNPGDVTSMVAQAMGVYGALTKAPVP GTPDSLSSGSSRDVQGTDASLDEELDRVKMS (SEQ ID NO:1531) in D11853_PEA_{—}1_P16 (SEQ ID NO:596).

[2160] Comparison report between D11853_PEA_{—}1_P16 (SEQ ID NO:596) and Q96FY2 (SEQ ID NO:638):

[2161] 1. An isolated chimeric polypeptide encoding for D11853_PEA_{—}1_P16 (SEQ ID NO:596) comprising a first amino acid sequence being at least 90% homologous to MLARAARGTGALLLRGSLLASGRAPRRASSGLPRNTVVLFVPQQEAWVVERMGRFHRI LEPGLNILIPVLDRIRYVQSLKEIVINVPEQSAVTLDNVTLQIDGVLYLRIMDPYKASYGV EDPEYAVTQ corresponding to amino acids 1-128 of Q96FY2 (SEQ ID NO:638), which also corresponds to amino acids 1-128 of D11853_PEA_{—}1_P16 (SEQ ID NO:596), a bridging amino acid L corresponding to amino acid 129 of D11853_PEA_{—}1_P16 (SEQ ID NO:596), a second amino acid sequence being at least 90% homologous to AQTTMRSELGKLSLDKVFR corresponding to amino acids 130-148 of Q96FY2 (SEQ ID NO:638), which also corresponds to amino acids 130-148 of D11853_PEA_{—}1_P16 (SEQ ID NO:596), and a third amino acid sequence being at least 90% homologous to VEAERRKRATVLESEGTRESAINVAEGKKQAQILASEAEKAEQINQAAGEASAVLAKA KAKAEAIRILAAALTQHNGDAAASLTVAEQYVSAFSKLAKDSNTILLPSNPGDVTSMVA QAMGVYGALTKAPVPGTPDSLSSGSSRDVQGTDASLDEELDRVKMS corresponding to amino acids 194-356 of Q96FY2 (SEQ ID NO:638), which also corresponds to amino acids 149-311 of D11853_PEA_{—}1_P16 (SEQ ID NO:596), wherein said first amino acid sequence, bridging amino acid, second amino acid sequence and third amino acid sequence are contiguous and in a sequential order.

[2162] 2. An isolated chimeric polypeptide encoding for an edge portion of D11853_PEA_{—}1_P16 (SEQ ID NO:596), comprising a polypeptide having a length “n”, wherein n is at least about 10 amino acids in length, optionally at least about 20 amino acids in length, preferably at least about 30 amino acids in length, more preferably at least about 40 amino acids in length and most preferably at least about 50 amino acids in length, wherein at least two amino acids comprise RV, having a structure as follows: a sequence starting from any of amino acid numbers 148−x to 148; and ending at any of amino acid numbers 149+((n−2)−x), in which x varies from 0 to n−2.

[2163] Comparison report between D11853_PEA_{—}1_P16 (SEQ ID NO:596) and Q9UJZ1 (SEQ ID NO:637):

[2164] 1. An isolated chimeric polypeptide encoding for D11853_PEA_{—}1_P16 (SEQ ID NO:596) comprising a first amino acid sequence being at least 90% homologous to MLARAARGTGALLLRGSLLASGRAPRRASSGLPRNTVVLFVPQQEAWVVERMGRFHRI LEPGLNILIPVLDRIRYVQSLKEIVINVPEQSAVTLDNVTLQIDGVLYLRIMDPYKASYGV EDPEYAVTQLAQTTMRSELGKLSLDKVFR corresponding to amino acids 1-148 of Q9UJZ1 (SEQ ID NO:637), which also corresponds to amino acids 1-148 of D11853_PEA_{—}1_P16 (SEQ ID NO:596), and a second amino acid sequence being at least 90% homologous to VEAERRKRATVLESEGTRESAINVAEGKKQAQILASEAEKAEQINQAAGEASAVLAKA KAKAEAIRILAAALTQHNGDAAASLTVAEQYVSAFSKLAKDSNTILLPSNPGDVTSMVA QAMGVYGALTKAPVPGTPDSLSSGSSRDVQGTDASLDEELDRVKMS corresponding to amino acids 194-356 of Q9UJZ1 (SEQ ID NO:637), which also corresponds to amino acids 149-311 of D11853_PEA_{—}1_P16 (SEQ ID NO:596), wherein said first amino acid sequence and second amino acid sequence are contiguous and in a sequential order.

[2165] 2. An isolated chimeric polypeptide encoding for an edge portion of D11853_PEA_{—}1_P16 (SEQ ID NO:596), comprising a polypeptide having a length “n”, wherein n is at least about 10 amino acids in length, optionally at least about 20 amino acids in length, preferably at least about 30 amino acids in length, more preferably at least about 40 amino acids in length and most preferably at least about 50 amino acids in length, wherein at least two amino acids comprise RV, having a structure as follows: a sequence starting from any of amino acid numbers 148−x to 148; and ending at any of amino acid numbers 149+((n−2)−x), in which x varies from 0 to n−2.

[2166] The location of the variant protein was determined according to results from a number of different software programs and analyses, including analyses from SignalP and other specialized programs. The variant protein is believed to be located as follows with regard to the cell: secreted. The protein localization is believed to be secreted because one of the two signal-peptide prediction programs (HMM:Signal peptide,NN:NO) predicts that this protein has a signal peptide.

[2167] Variant protein D11853_PEA_{—}1_P16 (SEQ ID NO:596) also has the following non-silent SNPs (Single Nucleotide Polymorphisms) as listed in Table 21, (given according to their position(s) on the amino acid sequence, with the alternative amino acid(s) listed; the last column indicates whether the SNP is known or not; the presence of known SNPs in variant protein D11853_PEA_{—}1_P16 (SEQ ID NO:596) sequence provides support for the deduced sequence of this variant protein according to the present invention).

[2168] Variant protein D11853_PEA_{—}1_P16 (SEQ ID NO:596) is encoded by the following transcript(s): D11853_PEA_{—}1_T24 (SEQ ID NO:71), for which the sequence(s) is/are given at the end of the application. The coding portion of transcript D11853_PEA_{—}1_T24 (SEQ ID NO:71) is shown in bold; this coding portion starts at position 108 and ends at position 1040. The transcript also has the following SNPs as listed in Table 22 (given according to their position on the nucleotide sequence, with the alternative nucleic acid listed; the last column indicates whether the SNP is known or not; the presence of known SNPs in variant protein D11853_PEA_{—}1_P16 (SEQ ID NO:596) sequence provides support for the deduced sequence of this variant protein according to the present invention).

[2169] Variant protein D11853_PEA_{—}1_P18 (SEQ ID NO:597) according to the present invention has an amino acid sequence as given at the end of the application; it is encoded by transcript(s) D11853_PEA_{—}1_T26 (SEQ ID NO:73). An alignment is given to the known protein (Membrane associated protein SLP-2 (SEQ ID NO:637)) at the end of the application. One or more alignments to one or more previously published protein sequences are given at the end of the application. A brief description of the relationship of the variant protein according to the present invention to each such aligned protein is as follows:

[2170] Comparison report between D11853_PEA_{—}1_P18 (SEQ ID NO:597) and Q9P₀₄₂ (SEQ ID NO:639):

[2171] 1. An isolated chimeric polypeptide encoding for D11853_PEA_{—}1_P18 (SEQ ID NO:597), comprising a first amino acid sequence being at least 70%, optionally at least 80%, preferably at least 85%, more preferably at least 90% and most preferably at least 95% homologous to a polypeptide having the sequence MLARAARGTGALLLRGSLLASGRAPR (SEQ ID NO:1530) corresponding to amino acids 1-26 of D11853_PEA_{—}1_P18 (SEQ ID NO:597), a second amino acid sequence being at least 90% homologous to RASSGLPRNTVVLFVPQQEAWVVERMGRFHRILEPGLNILIPVLDRIRYVQSLKEIVINVP EQSAVTLDNVTLQIDGVLYLRIMDPYKASYGVEDPEYAVTQLAQTTMRSELGKLSLDK VFRERESLNASI corresponding to amino acids 13-143 of Q9P₀₄₂ (SEQ ID NO:639), which also corresponds to amino acids 27-157 of D11853_PEA_{—}1_P18 (SEQ ID NO:597), and a third amino acid sequence being at least 90% homologous to VAQAMGVYGALTKAPVPGTPDSLSSGSSRDVQGTDASLDEELDRVKMS corresponding to amino acids 295-342 of Q9P₀₄₂ (SEQ ID NO:639), which also corresponds to amino acids 158-205 of D11853_PEA_{—}1_P18 (SEQ ID NO:597), wherein said first amino acid sequence, second amino acid sequence and third amino acid sequence are contiguous and in a sequential order.

[2172] 2. An isolated polypeptide encoding for a head of D11853_PEA_{—}1_P118 (SEQ ID NO:597) comprising a polypeptide being at least 70%, optionally at least about 80%, preferably at least about 85%, more preferably at least about 90% and most preferably at least about 95% homologous to the sequence MLARAARGTGALLLRGSLLASGRAPR (SEQ ID NO:1530) of D11853_PEA_{—}1_P18 (SEQ ID NO:597).

[2173] 3. An isolated chimeric polypeptide encoding for an edge portion of D11853_PEA_{—}1_P18 (SEQ ID NO:597), comprising a polypeptide having a length “n”, wherein n is at least about 10 amino acids in length, optionally at least about 20 amino acids in length, preferably at least about 30 amino acids in length, more preferably at least about 40 amino acids in length and most preferably at least about 50 amino acids in length, wherein at least two amino acids comprise IV, having a structure as follows: a sequence starting from any of amino acid numbers 157−x to 157; and ending at any of amino acid numbers 158+((n−2)−x), in which x varies from 0 to n−2.

[2174] Comparison report between D11853_PEA_{—}1_P18 (SEQ ID NO:597) and Q96FY2 (SEQ ID NO:638):

[2175] 1. An isolated chimeric polypeptide encoding for D11853_PEA_{—}1_P18 (SEQ ID NO:597) comprising a first amino acid sequence being at least 90% homologous to MLARAARGTGALLLRGSLLASGRAPRRASSGLPRNTVVLFVPQQEAWVVERMGRFHRI LEPGLNILIPVLDRIRYVQSLKEIVINVPEQSAVTLDNVTLQIDGVLYLRIMDPYKASYGV EDPEYAVTQ corresponding to amino acids 1-128 of Q96FY2 (SEQ ID NO:638), which also corresponds to amino acids 1-128 of D11853_PEA_{—}1_P18 (SEQ ID NO:597), a bridging amino acid L corresponding to amino acid 129 of D11853_PEA_{—}1_P18 (SEQ ID NO:597), a second amino acid sequence being at least 90% homologous to AQTTMRSELGKLSLDKVFRERESLNASI corresponding to amino acids 130-157 of Q96FY2 (SEQ ID NO:638), which also corresponds to amino acids 130-157 of D11853_PEA_{—}1_P18 (SEQ ID NO:597), and a third amino acid sequence being at least 90% homologous to VAQAMGVYGALTKAPVPGTPDSLSSGSSRDVQGTDASLDEELDRVKMS corresponding to amino acids 309-356 of Q96FY2 (SEQ ID NO:638), which also corresponds to amino acids 158-205 of D11853_PEA_{—}1_P18 (SEQ ID NO:597), wherein said first amino acid sequence, bridging amino acid, second amino acid sequence and third amino acid sequence are contiguous and in a sequential order.

[2176] 2. An isolated chimeric polypeptide encoding for an edge portion of D11853_PEA_{—}1_P18 (SEQ ID NO:597), comprising a polypeptide having a length “n”, wherein n is at least about 10 amino acids in length, optionally at least about 20 amino acids in length, preferably at least about 30 amino acids in length, more preferably at least about 40 amino acids in length and most preferably at least about 50 amino acids in length, wherein at least two amino acids comprise IV, having a structure as follows: a sequence starting from any of amino acid numbers 157−x to 157; and ending at any of amino acid numbers 158+((n−2)−x), in which x varies from 0 to n−2.

[2177] Comparison report between D11853_PEA_{—}1_P18 (SEQ ID NO:597) and Q9UJZ1 (SEQ ID NO:637):

[2178] 1. An isolated chimeric polypeptide encoding for D11853_PEA_{—}1_P18 (SEQ ID NO:597) comprising a first amino acid sequence being at least 90% homologous to MLARAARGTGALLLRGSLLASGRAPRRASSGLPRNTVVLFVPQQEAWVVERMGRFHRI LEPGLNILIPVLDRIRYVQSLKEIVINVPEQSAVTLDNVTLQIDGVLYLRIMDPYKASYGV EDPEYAVTQLAQTTMRSELGKLSLDKVFRERESLNASI corresponding to amino acids 1-157 of Q9UJZ1 (SEQ ID NO:637), which also corresponds to amino acids 1-157 of D11853_PEA_{—}1_P18 (SEQ ID NO:597), and a second amino acid sequence being at least 90% homologous to VAQAMGVYGALTKAPVPGTPDSLSSGSSRDVQGTDASLDEELDRVKMS corresponding to amino acids 309-356 of Q9UJZ1 (SEQ ID NO:637), which also corresponds to amino acids 158-205 of D11853_PEA_{—}1_P18 (SEQ ID NO:597), wherein said first amino acid sequence and second amino acid sequence are contiguous and in a sequential order.

[2179] 2. An isolated chimeric polypeptide encoding for an edge portion of D11853_PEA_{—}1_P18 (SEQ ID NO:597), comprising a polypeptide having a length “n”, wherein n is at least about 10 amino acids in length, optionally at least about 20 amino acids in length, preferably at least about 30 amino acids in length, more preferably at least about 40 amino acids in length and most preferably at least about 50 amino acids in length, wherein at least two amino acids comprise IV, having a structure as follows: a sequence starting from any of amino acid numbers 157−x to 157; and ending at any of amino acid numbers 158+((n−2)−x), in which x varies from 0 to n−2.

[2180] The location of the variant protein was determined according to results from a number of different software programs and analyses, including analyses from SignalP and other specialized programs. The variant protein is believed to be located as follows with regard to the cell: secreted. The protein localization is believed to be secreted because one of the two signal-peptide prediction programs (HMM:Signal peptide,NN:NO) predicts that this protein has a signal peptide.

[2181] Variant protein D11853_PEA_{—}1_P18 (SEQ ID NO:597) also has the following non-silent SNPs (Single Nucleotide Polymorphisms) as listed in Table 23, (given according to their position(s) on the amino acid sequence, with the alternative amino acid(s) listed; the last column indicates whether the SNP is known or not; the presence of known SNPs in variant protein D11853_PEA_{—}1_P18 (SEQ ID NO:597) sequence provides support for the deduced sequence of this variant protein according to the present invention).

[2182] Variant protein D11853_PEA_{—}1_P18 (SEQ ID NO:597) is encoded by the following transcript(s): D11853_PEA_{—}1_T26 (SEQ ID NO:73), for which the sequence(s) is/are given at the end of the application. The coding portion of transcript D11853_PEA_{—}1_T26 (SEQ ID NO:73) is shown in bold; this coding portion starts at position 108 and ends at position 722. The transcript also has the following SNPs as listed in Table 24 (given according to their position on the nucleotide sequence, with the alternative nucleic acid listed; the last column indicates whether the SNP is known or not; the presence of known SNPs in variant protein D11853_PEA_{—}1_P18 (SEQ ID NO:597) sequence provides support for the deduced sequence of this variant protein according to the present invention).

[2183] Variant protein D11853_PEA_{—}1_P19 (SEQ ID NO:598) according to the present invention has an amino acid sequence as given at the end of the application; it is encoded by transcript(s) D11853_PEA_{—}1_T27 (SEQ ID NO:74). An alignment is given to the known protein (Membrane associated protein SLP-2 (SEQ ID NO:637)) at the end of the application. One or more alignments to one or more previously published protein sequences are given at the end of the application. A brief description of the relationship of the variant protein according to the present invention to each such aligned protein is as follows:

[2184] Comparison report between D11853_PEA_{—}1_P19 (SEQ ID NO:598) and Q9P₀₄₂ (SEQ ID NO:639:

[2185] 1. An isolated chimeric polypeptide encoding for D11853_PEA_{—}1_P19 (SEQ ID NO:598) comprising a first amino acid sequence being at least 70%, optionally at least 80%, preferably at least 85%, more preferably at least 90% and most preferably at least 95% homologous to a polypeptide having the sequence MLARAARGTGALLLRGSLLASGRAPR (SEQ ID NO:1530) corresponding to amino acids 1-26 of D11853_PEA_{—}1_P19 (SEQ ID NO:598), a second amino acid sequence being at least 90% homologous to RASSGLPRNTVVLFVPQQEAWVVERMGRFHRILEPGLNILIPVLDRIRYVQSLKEIVINVP EQSAVTLDNVTLQIDGVLYLRIMDPYKASYGVEDPEYAVTQLAQTTMRSELGKLS corresponding to amino acids 13-128 of Q9P₀₄₂ (SEQ ID NO:639), which also corresponds to amino acids 27-142 of D11853_PEA_{—}1_P19 (SEQ ID NO:598), and a third amino acid sequence being at least 70%, optionally at least 80%, preferably at least 85%, more preferably at least 90% and most preferably at least 95% homologous to a polypeptide having the sequence SRLTLQWEQQRCPGYRCKS (SEQ ID NO:1552) corresponding to amino acids 143-161 of D11853_PEA_{—}1_P19 (SEQ ID NO:598), wherein said first amino acid sequence, second amino acid sequence and third amino acid sequence are contiguous and in a sequential order.

[2186] 2. An isolated polypeptide encoding for a head of D11853_PEA_{—}1_P19 (SEQ ID NO:598) comprising a polypeptide being at least 70%, optionally at least about 80%, preferably at least about 85%, more preferably at least about 90% and most preferably at least about 95% homologous to the sequence MLARAARGTGALLLRGSLLASGRAPR (SEQ ID NO:1530) of D11853_PEA_{—}1_P19 (SEQ ID NO:598).

[2187] 3. An isolated polypeptide encoding for a tail of D11853_PEA_{—}1_P19 (SEQ ID NO:598), comprising a polypeptide being at least 70%, optionally at least about 80%, preferably at least about 85%, more preferably at least about 90% and most preferably at least about 95% homologous to the sequence SRLTLQWEQQRCPGYRCKS (SEQ ID NO:1552) in D11853_PEA_{—}1_{—P}19 (SEQ ID NO:598).

[2188] Comparison report between D11853_PEA_{—}1_P19 (SEQ ID NO:598) and Q96FY2 (SEQ ID NO:638):

[2189] 1. An isolated chimeric polypeptide encoding for D11853_PEA_{—}1_P19 (SEQ ID NO:598) comprising a first amino acid sequence being at least 90% homologous to MLARAARGTGALLLRGSLLASGRAPRRASSGLPRNTVVLFVPQQEAWVVERMGRFHRI LEPGLNILIPVLDRIRYVQSLKEIVINVPEQSAVTLDNVTLQIDGVLYLRIMDPYKASYGV EDPEYAVTQ corresponding to amino acids 1-128 of Q96FY2 (SEQ ID NO:638), which also corresponds to amino acids 1-128 of D11853_PEA_{—}1_P19 (SEQ ID NO:598), a bridging amino acid L corresponding to amino acid 129 of D11853_PEA_{—}1_P19 (SEQ ID NO:598), a second amino acid sequence being at least 90% homologous to AQTTMRSELGKLS corresponding to amino acids 130-142 of Q96FY2 (SEQ ID NO:638), which also corresponds to amino acids 130-142 of D11853_PEA_{—}1_P19 (SEQ ID NO:598), and a third amino acid sequence being at least 70%, optionally at least 80%, preferably at least 85%, more preferably at least 90% and most preferably at least 95% homologous to a polypeptide having the sequence SRLTLQWEQQRCPGYRCKS (SEQ ID NO:1552) corresponding to amino acids 143-161 of D11853_PEA_{—}1_P19 (SEQ ID NO:598), wherein said first amino acid sequence, bridging amino acid, second amino acid sequence and third amino acid sequence are contiguous and in a sequential order.

[2190] 2. An isolated polypeptide encoding for a tail of D11853_PEA_{—}1_P19 (SEQ ID NO:598), comprising a polypeptide being at least 70%, optionally at least about 80%, preferably at least about 85%, more preferably at least about 90% and most preferably at least about 95% homologous to the sequence SRLTLQWEQQRCPGYRCKS (SEQ ID NO:1552) in D11853_PEA_{—}1_P19 (SEQ ID NO:598).

[2191] Comparison report between D11853_PEA_{—}1_P19 (SEQ ID NO:598) and Q9UJZ1 (SEQ ID NO:637):

[2192] 1. An isolated chimeric polypeptide encoding for D11853_PEA_{—}1_P19 (SEQ ID NO:598), comprising a first amino acid sequence being at least 90% homologous to MLARAARGTGALLLRGSLLASGRAPRRASSGLPRNTVVLFVPQQEAWVVERMGRFHRI LEPGLNILIPVLDRIRYVQSLKEIVINVPEQSAVTLDNVTLQIDGVLYLRIMDPYKASYGV EDPEYAVTQLAQTTMRSELGKLS corresponding to amino acids 1-142 of Q9UJZ1 (SEQ ID NO:637), which also corresponds to amino acids 1-142 of D11853_PEA_{—}1_P19 (SEQ ID NO:598), and a second amino acid sequence being at least 70%, optionally at least 80%, preferably at least 85%, more preferably at least 90% and most preferably at least 95% homologous to a polypeptide having the sequence SRLTLQWEQQRCPGYRCKS (SEQ ID NO:1552) corresponding to amino acids 143-161 of D11853_PEA_{—}1_P19 (SEQ ID NO:598), wherein said first amino acid sequence and second amino acid sequence are contiguous and in a sequential order.

[2193] 2. An isolated polypeptide encoding for a tail of D11853_PEA_{—}1_P19 (SEQ ID NO:598), comprising a polypeptide being at least 70%, optionally at least about 80%, preferably at least about 85%, more preferably at least about 90% and most preferably at least about 95% homologous to the sequence SRLTLQWEQQRCPGYRCKS (SEQ ID NO:1552) in D11853_PEA_{—}1_P19 (SEQ ID NO:598).

[2194] The location of the variant protein was determined according to results from a number of different software programs and analyses, including analyses from SignalP and other specialized programs. The variant protein is believed to be located as follows with regard to the cell: secreted. The protein localization is believed to be secreted because one of the two signal-peptide prediction programs (HMM:Signal peptide,NN:NO) predicts that this protein has a signal peptide.

[2195] Variant protein D11853_PEA_{—}1_P19 (SEQ ID NO:598) also has the following non-silent SNPs (Single Nucleotide Polymorphisms) as listed in Table 25, (given according to their position(s) on the amino acid sequence, with the alternative amino acid(s) listed; the last column indicates whether the SNP is known or not; the presence of known SNPs in variant protein D11853_PEA_{—}1_P19 (SEQ ID NO:598) sequence provides support for the deduced sequence of this variant protein according to the present invention).

[2196] Variant protein D11853_PEA_{—}1_P19 (SEQ ID NO:598) is encoded by the following transcript(s): D11853_PEA_{—}1_T27 (SEQ ID NO:74), for which the sequence(s) is/are given at the end of the application. The coding portion of transcript D11853_PEA_{—}1_T27 (SEQ ID NO:74) is shown in bold; this coding portion starts at position 108 and ends at position 590. The transcript also has the following SNPs as listed in Table 26 (given according to their position on the nucleotide sequence, with the alternative nucleic acid listed; the last column indicates whether the SNP is known or not; the presence of known SNPs in variant protein D11853_PEA_{—}1_P19 (SEQ ID NO:598) sequence provides support for the deduced sequence of this variant protein according to the present invention).

[2197] Variant protein D11853_PEA_{—}1_P20 (SEQ ID NO:599) according to the present invention has an amino acid sequence as given at the end of the application; it is encoded by transcript(s) D11853_PEA_{—}1_T7 (SEQ ID NO:59), D11853_PEA_{—}1_T17 (SEQ ID NO:67) and D11853_PEA_{—}1_T25 (SEQ ID NO:72). The location of the variant protein was determined according to results from a number of different software programs and analyses, including analyses from SignalP and other specialized programs. The variant protein is believed to be located as follows with regard to the cell: secreted. The protein localization is believed to be secreted because one of the two signal-peptide prediction programs (HMM:Signal peptide,NN:NO) predicts that this protein has a signal peptide.

[2198] Variant protein D11853_PEA_{—}1_P20 (SEQ ID NO:599) is encoded by the following transcript(s): D11853_PEA_{—}1_T7 (SEQ ID NO:59), D11853_PEA_{—}1_T17 (SEQ ID NO:67) and D11853_PEA_{—}1_T25 (SEQ ID NO:72), for which the sequence(s) is/are given at the end of the application.

[2199] The coding portion of transcript D11853_PEA_{—}1_T7 (SEQ ID NO:59) is shown in bold; ding portion starts at position 108 and ends at position 287. The transcript also has the ing SNPs as listed in Table 27 (given according to their position on the nucleotide ce, with the alternative nucleic acid listed; the last column indicates whether the SNP is or not; the presence of known SNPs in variant protein D11853_PEA_{—}1_P20 (SEQ ID 9) sequence provides support for the deduced sequence of this variant protein according present invention).

[2200] The coding portion of transcript D11853_PEA_{—}1_T17 (SEQ ID NO:67) is shown in bold; this coding portion starts at position 108 and ends at position 287. The transcript also has the following SNPs as listed in Table 28 (given according to their position on the nucleotide sequence, with the alternative nucleic acid listed; the last column indicates whether the SNP is known or not; the presence of known SNPs in variant protein D11853_PEA_{—}1_P20 (SEQ ID NO:599) sequence provides support for the deduced sequence of this variant protein according to the present invention).

[2201] The coding portion of transcript D11853_PEA_{—}1_T25 (SEQ ID NO:72) is shown in bold; this coding portion starts at position 108 and ends at position 287. The transcript also has the following SNPs as listed in Table 29 (given according to their position on the nucleotide sequence, with the alternative nucleic acid listed; the last column indicates whether the SNP is known or not; the presence of known SNPs in variant protein D11853_PEA_{—}1_P20 (SEQ ID NO:599) sequence provides support for the deduced sequence of this variant protein according to the present invention).

[2202] Variant protein D11853_PEA_{—}1_P21 (SEQ ID NO:600) according to the present invention has an amino acid sequence as given at the end of the application; it is encoded by transcript(s) D11853_PEA_{—}1_T8 (SEQ ID NO:60). An alignment is given to the known protein (Membrane associated protein SLP-2 (SEQ ID NO:637)) at the end of the application. One or more alignments to one or more previously published protein sequences are given at the end of the application. A brief description of the relationship of the variant protein according to the present invention to each such aligned protein is as follows:

[2203] Comparison report between D11853_PEA_{—}1_P21 (SEQ ID NO:600) and Q96FY2 (SEQ ID NO:638):

[2204] 1. An isolated chimeric polypeptide encoding for D11853_PEA_{—}1_P21 (SEQ ID NO:600) comprising a first amino acid sequence being at least 90% homologous to MLARAARGTGALLLRGSLLASGRAPRRASSGLPRNTVVLFVPQQEAWVVERMGRFHRI LEP corresponding to amino acids 1-61 of Q96FY2 (SEQ ID NO:638), which also corresponds to amino acids 1-61 of D11853_PEA_{—}1_P21 (SEQ ID NO:600), and a second amino acid sequence being at least 70%, optionally at least 80%, preferably at least 85%, more preferably at least 90% and most preferably at least 95% homologous to a polypeptide having the sequence VRNLFCPPWASQMTNPSRHAMSGGLPLGLPALLAPDSVGQT (SEQ ID NO:1553) corresponding to amino acids 62-102 of D11853_PEA_{—}1_P21 (SEQ ID NO:600), wherein said first amino acid sequence and second amino acid sequence are contiguous and in a sequential order.

[2205] 2. An isolated polypeptide encoding for a tail of D11853_PEA_{—}1_P21 (SEQ ID NO:600), comprising a polypeptide being at least 70%, optionally at least about 80%, preferably at least about 85%, more preferably at least about 90% and most preferably at least about 95% homologous to the sequence VRNLFCPPWASQMTNPSRHAMSGGLPLGLPALLAPDSVGQT (SEQ ID NO:1553) in D11853_PEA_{—}1_{—P}21 (SEQ ID NO:600).

[2206] Comparison report between D11853_PEA_{—}1_P21 (SEQ ID NO:600) and Q9UJZ1 (SEQ ID NO:637):

[2207] 1. An isolated chimeric polypeptide encoding for D11853_PEA_{—}1_P21 (SEQ ID NO:600) comprising a first amino acid sequence being at least 90% homologous to MLARAARGTGALLLRGSLLASGRAPRRASSGLPRNTVVLFVPQQEAWVVERMGRFHRI LEP corresponding to amino acids 1-61 of Q9UJZ1 (SEQ ID NO:637), which also corresponds to amino acids 1-61 of D11853_PEA_{—}1_P21 (SEQ ID NO:600), and a second amino acid sequence being at least 70%, optionally at least 80%, preferably at least 85%, more preferably at least 90% and most preferably at least 95% homologous to a polypeptide having the sequence VRNLFCPPWASQMTNPSRHAMSGGLPLGLPALLAPDSVGQT (SEQ ID NO:1553) corresponding to amino acids 62-102 of D11853_PEA_{—}1_P21 (SEQ ID NO:600), wherein said first amino acid sequence and second amino acid sequence are contiguous and in a sequential order.

[2208] 2. An isolated polypeptide encoding for a tail of D11853_PEA_{—}1_P21 (SEQ ID NO:600), comprising a polypeptide being at least 70%, optionally at least about 80%, preferably at least about 85%, more preferably at least about 90% and most preferably at least about 95% homologous to the sequence VRNLFCPPWASQMTNPSRHAMSGGLPLGLPALLAPDSVGQT (SEQ ID NO:1553) in D11853_PEA_{—}1_P21 (SEQ ID NO:600).

[2209] The location of the variant protein was determined according to results from a number of different software programs and analyses, including analyses from SignalP and other specialized programs. The variant protein is believed to be located as follows with regard to the cell: secreted. The protein localization is believed to be secreted because one of the two signal-peptide prediction programs (HMM:Signal peptide,NN:NO) predicts that this protein has a signal peptide.

[2210] Variant protein D11853_PEA_{—}1_P21 (SEQ ID NO:600) also has the following non-silent SNPs (Single Nucleotide Polymorphisms) as listed in Table 30, (given according to their position(s) on the amino acid sequence, with the alternative amino acid(s) listed; the last column indicates whether the SNP is known or not; the presence of known SNPs in variant protein D11853_PEA_{—}1_P21 (SEQ ID NO:600) sequence provides support for the deduced sequence of this variant protein according to the present invention).

[2211] Variant protein D11853_PEA_{—}1_P21 (SEQ ID NO:600) is encoded by the following transcript(s): D11853_PEA_{—}1_T8 (SEQ ID NO:60, for which the sequence(s) is/are given at the end of the application. The coding portion of transcript D11853_PEA_{—}1_T8 (SEQ ID NO:60) is shown in bold; this coding portion starts at position 108 and ends at position 413. The transcript also has the following SNPs as listed in Table 31 (given according to their position on the nucleotide sequence, with the alternative nucleic acid listed; the last column indicates whether the SNP is known or not; the presence of known SNPs in variant protein D11853_PEA_{—}1_P21 (SEQ ID NO:600) sequence provides support for the deduced sequence of this variant protein according to the present invention).

[2212] Variant protein D11853_PEA_{—}1_P22 (SEQ ID NO:601) according to the present invention has an amino acid sequence as given at the end of the application; it is encoded by transcript(s) D11853_PEA_{—}1_T9 (SEQ ID NO:61). An alignment is given to the known protein (Membrane associated protein SLP-2 (SEQ ID NO:637)) at the end of the application. One or more alignments to one or more previously published protein sequences are given at the end of the application. A brief description of the relationship of the variant protein according to the present invention to each such aligned protein is as follows:

[2213] Comparison report between D11853_PEA_{—}1_P22 (SEQ ID NO:601) and Q9P₀₄₂ (SEQ ID NO:639):

[2214] 1. An isolated chimeric polypeptide encoding for D11853_PEA_{—}1_P22 (SEQ ID NO:601) comprising a first amino acid sequence being at least 70%, optionally at least 80%, preferably at least 85%, more preferably at least 90% and most preferably at least 95% homologous to a polypeptide having the sequence MLARAARGTGALLLRGSLLASGRAPR (SEQ ID NO:1530) corresponding to amino acids 1-26 of D11853_PEA_{—}1_P22 (SEQ ID NO:601), a second amino acid sequence being at least 90% homologous to RASSGLPRNTVVLFVPQQEAWVVERMGRFHRILEP corresponding to amino acids 13-47 of Q9P₀₄₂ (SEQ ID NO:639), which also corresponds to amino acids 27-61 of D11853_PEA_{—}1_P22 (SEQ ID NO:601), and a third amino acid sequence being at least 70%, optionally at least 80%, preferably at least 85%, more preferably at least 90% and most preferably at least 95% homologous to a polypeptide having the sequence ELLLFWACSMC (SEQ ID NO:1555) corresponding to amino acids 62-72 of D11853_PEA_{—}1_P22 (SEQ ID NO:601), wherein said first amino acid sequence, second amino acid sequence and third amino acid sequence are contiguous and in a sequential order.

[2215] 2. An isolated polypeptide encoding for a head of D11853_PEA_{—}1_P22 (SEQ ID NO:601) comprising a polypeptide being at least 70%, optionally at least about 80%, preferably at least about 85%, more preferably at least about 90% and most preferably at least about 95% homologous to the sequence MLARAARGTGALLLRGSLLASGRAPR (SEQ ID NO:1530) of D11853_PEA_{—}1_{—P}22 (SEQ ID NO:601).

[2216] 3. An isolated polypeptide encoding for a tail of D11853_PEA_{—}1_P22 (SEQ ID NO:601), comprising a polypeptide being at least 70%, optionally at least about 80%, preferably at least about 85%, more preferably at least about 90% and most preferably at least about 95% homologous to the sequence ELLLFWACSMC (SEQ ID NO:1555) in D11853_PEA_{—}1_P22 (SEQ ID NO:601).

[2217] Comparison report between D11853_PEA_{—}1_P22 (SEQ ID NO:601) and Q96FY2 (SEQ ID NO:638):

[2218] 1. An isolated chimeric polypeptide encoding for D11853_PEA_{—}1_P22 (SEQ ID NO:601) comprising a first amino acid sequence being at least 90% homologous to MLARAARGTGALLLRGSLLASGRAPRRASSGLPRNTVVLFVPQQEAWVVERMGRFHRI LEP corresponding to amino acids 1-61 of Q96FY2 (SEQ ID NO:638), which also corresponds to amino acids 1-61 of D11853_PEA_{—}1_P22 (SEQ ID NO:601), and a second amino acid sequence being at least 70%, optionally at least 80%, preferably at least 85%, more preferably at least 90% and most preferably at least 95% homologous to a polypeptide having the sequence ELLLFWACSMC (SEQ ID NO:1555) corresponding to amino acids 62-72 of D11853_PEA_{—}1_P22 (SEQ ID NO:601), wherein said first amino acid sequence and second amino acid sequence are contiguous and in a sequential order.

[2219] 2. An isolated polypeptide encoding for a tail of D11853_PEA_{—}1_P22 (SEQ ID NO:601), comprising a polypeptide being at least 70%, optionally at least about 80%, preferably at least about 85%, more preferably at least about 90% and most preferably at least about 95% homologous to the sequence ELLLFWACSMC (SEQ ID NO:1555) in D11853_PEA_{—}1_P22 (SEQ ID NO:601).

[2220] Comparison report between D11853_PEA_{—}1_P22 (SEQ ID NO:601) and Q9UJZ1 (SEQ ID NO:637):

[2221] 1. An isolated chimeric polypeptide encoding for D11853_PEA_{—}1_P22 (SEQ ID NO:601), comprising a first amino acid sequence being at least 90% homologous to MLARAARGTGALLLRGSLLASGRAPRRASSGLPRNTVVLFVPQQEAWVVERMGRFHRI LEP corresponding to amino acids 1-61 of Q9UJZ1 (SEQ ID NO:637), which also corresponds to amino acids 1-61 of D11853_PEA_{—}1_P22 (SEQ ID NO:601), and a second amino acid sequence being at least 70%, optionally at least 80%, preferably at least 85%, more preferably at least 90% and most preferably at least 95% homologous to a polypeptide having the sequence ELLLFWACSMC (SEQ ID NO:1555) corresponding to amino acids 62-72 of D11853_PEA_{—}1_P22 (SEQ ID NO:601), wherein said first amino acid sequence and second amino acid sequence are contiguous and in a sequential order.

[2222] 2. An isolated polypeptide encoding for a tail of D11853_PEA_{—}1_P22 (SEQ ID NO:601), comprising a polypeptide being at least 70%, optionally at least about 80%, preferably at least about 85%, more preferably at least about 90% and most preferably at least about 95% homologous to the sequence ELLLFWACSMC (SEQ ID NO:1555) in D11853_PEA_{—}1_P22 (SEQ ID NO:601).

[2223] The location of the variant protein was determined according to results from a number of different software programs and analyses, including analyses from SignalP and other specialized programs. The variant protein is believed to be located as follows with regard to the cell: secreted. The protein localization is believed to be secreted because one of the two signal-peptide prediction programs (HMM:Signal peptide,NN:NO) predicts that this protein has a signal peptide.

[2224] Variant protein D11853_PEA_{—}1_P22 (SEQ ID NO:601) also has the following non-silent SNPs (Single Nucleotide Polymorphisms) as listed in Table 32, (given according to their position(s) on the amino acid sequence, with the alternative amino acid(s) listed; the last column indicates whether the SNP is known or not; the presence of known SNPs in variant protein D11853_PEA_{—}1_P22 (SEQ ID NO:601) sequence provides support for the deduced sequence of this variant protein according to the present invention).

[2225] Variant protein D11853_PEA_{—}1_P22 (SEQ ID NO:601) is encoded by the following transcript(s): D11853_PEA_{—}1_T9 (SEQ ID NO:61), for which the sequence(s) is/are given at the end of the application. The coding portion of transcript D11853_PEA_{—}1_T9 (SEQ ID NO:61) is shown in bold; this coding portion starts at position 108 and ends at position 323. The transcript also has the following SNPs as listed in Table 33 (given according to their position on the nucleotide sequence, with the alternative nucleic acid listed; the last column indicates whether the SNP is known or not; the presence of known SNPs in variant protein D11853_PEA_{—}1_P22 (SEQ ID NO:601) sequence provides support for the deduced sequence of this variant protein according to the present invention).

[2226] Variant protein D11853_PEA_{—}1_P24 (SEQ ID NO:602) according to the present invention has an amino acid sequence as given at the end of the application; it is encoded by transcript(s) D11853_PEA_{—}1_T21 (SEQ ID NO:69). An alignment is given to the known protein (Membrane associated protein SLP-2 (SEQ ID NO:637)) at the end of the application. One or more alignments to one or more previously published protein sequences are given at the end of the application. A brief description of the relationship of the variant protein according to the present invention to each such aligned protein is as follows:

[2227] Comparison report between D11853_PEA_{—}1_P24 (SEQ ID NO:602) and Q9P₀₄₂ (SEQ ID NO:639):

[2228] 1. An isolated chimeric polypeptide encoding for D11853_PEA_{—}1_P24 (SEQ ID NO:602), comprising a first amino acid sequence being at least 70%, optionally at least 80%, preferably at least 85%, more preferably at least 90% and most preferably at least 95% homologous to a polypeptide having the sequence MLARAARGTGALLLRGSLLASGRAPR (SEQ ID NO:1530) corresponding to amino acids 1-26 of D11853_PEA_{—}1_P24 (SEQ ID NO:602), a second amino acid sequence being at least 90% homologous to RAS SGLPRNTVVLFVPQQEAWVVERMGRFHRILEPGLNILIPVLDRIRYVQSLKEIVINVP EQSAVTL corresponding to amino acids 13-80 of Q9P₀₄₂ (SEQ ID NO:639), which also corresponds to amino acids 27-94 of D11853_PEA_{—}1_P24 (SEQ ID NO:602), and a third amino acid sequence being at least 70%, optionally at least 80%, preferably at least 85%, more preferably at least 90% and most preferably at least 95% homologous to a polypeptide having the sequence GTGVPECQHCGCHQPSC (SEQ ID NO:1557) corresponding to amino acids 95-111 of D11853_PEA_{—}1_P24 (SEQ ID NO:602), wherein said first amino acid sequence, second amino acid sequence and third amino acid sequence are contiguous and in a sequential order.

[2229] 2. An isolated polypeptide encoding for a head of D11853_PEA_{—}1_P24 (SEQ ID NO:602), comprising a polypeptide being at least 70%, optionally at least about 80%, preferably at least about 85%, more preferably at least about 90% and most preferably at least about 95% homologous to the sequence MLARAARGTGALLLRGSLLASGRAPR (SEQ ID NO:1530) of D11853_PEA_{—}1_P24 (SEQ ID NO:602).

[2230] 3. An isolated polypeptide encoding for a tail of D11853_PEA_{—}1_P24 (SEQ ID NO:602), comprising a polypeptide being at least 70%, optionally at least about 80%, preferably at least about 85%, more preferably at least about 90% and most preferably at least about 95% homologous to the sequence GTGVPECQHCGCHQPSC (SEQ ID NO:1557) in D11853_PEA_{—}1_P24 (SEQ ID NO:602).

[2231] Comparison report between D11853_PEA_{—}1_P24 (SEQ ID NO:602) and Q96FY2 (SEQ ID NO:638):

[2232] 1. An isolated chimeric polypeptide encoding for D11853_PEA_{—}1_P24 (SEQ ID NO:602) comprising a first amino acid sequence being at least 90% homologous to MLARAARGTGALLLRGSLLASGRAPRRASSGLPRNTVVLFVPQQEAWVVERMGRFHRI LEPGLNILIPVLDRIRYVQSLKEIVINVPEQSAVTL corresponding to amino acids 1-94 of Q96FY2 (SEQ ID NO:638), which also corresponds to amino acids 1-94 of D11853_PEA_{—}1_P24 (SEQ ID NO:602), and a second amino acid sequence being at least 70%, optionally at least 80%, preferably at least 85%, more preferably at least 90% and most preferably at least 95% homologous to a polypeptide having the sequence GTGVPECQHCGCHQPSC (SEQ ID NO:1557) corresponding to amino acids 95-111 of D11853_PEA_{—}1_P24 (SEQ ID NO:602), wherein said first amino acid sequence and second amino acid sequence are contiguous and in a sequential order.

[2233] 2. An isolated polypeptide encoding for a tail of D11853_PEA_{—}1_P24 (SEQ ID NO:602), comprising a polypeptide being at least 70%, optionally at least about 80%, preferably at least about 85%, more preferably at least about 90% and most preferably at least about 95% homologous to the sequence GTGVPECQHCGCHQPSC (SEQ ID NO:1557) in D11853_PEA_{—}1_P24 (SEQ ID NO:602).

[2234] Comparison report between D11853_PEA_{—}1_P24 (SEQ ID NO:602) and Q9UJZ1 (SEQ ID NO:637):

[2235] 1. An isolated chimeric polypeptide encoding for D11853_PEA_{—}1_P24 (SEQ ID NO:602), comprising a first amino acid sequence being at least 90% homologous to MLARAARGTGALLLRGSLLASGRAPRRASSGLPRNTVVLFVPQQEAWVVERMGRFHRI LEPGLNILIPVLDRIRYVQSLKEIVINVPEQSAVTL corresponding to amino acids 1-94 of Q9UJZ1 (SEQ ID NO:637), which also corresponds to amino acids 1-94 of D11853_PEA_{—}1_P24 (SEQ ID NO:602), and a second amino acid sequence being at least 70%, optionally at least 80%, preferably at least 85%, more preferably at least 90% and most preferably at least 95% homologous to a polypeptide having the sequence GTGVPECQHCGCHQPSC (SEQ ID NO:1557) corresponding to amino acids 95-111 of D11853_PEA_{—}1_P24 (SEQ ID NO:602), wherein said first amino acid sequence and second amino acid sequence are contiguous and in a sequential order.

[2236] 2. An isolated polypeptide encoding for a tail of D11853_PEA_{—}1_P24 (SEQ ID NO:602), comprising a polypeptide being at least 70%, optionally at least about 80%, preferably at least about 85%, more preferably at least about 90% and most preferably at least about 95% homologous to the sequence GTGVPECQHCGCHQPSC (SEQ ID NO:1557) in D11853_PEA_{—}1_P24 (SEQ ID NO:602).

[2237] The location of the variant protein was determined according to results from a number of different software programs and analyses, including analyses from SignalP and other specialized programs. The variant protein is believed to be located as follows with regard to the cell: secreted. The protein localization is believed to be secreted because one of the two signal-peptide prediction programs (HMM:Signal peptide,NN:NO) predicts that this protein has a signal peptide.

[2238] Variant protein D11853_PEA_{—}1_P24 (SEQ ID NO:602) also has the following non-silent SNPs (Single Nucleotide Polymorphisms) as listed in Table 34, (given according to their position(s) on the amino acid sequence, with the alternative amino acid(s) listed; the last column indicates whether the SNP is known or not; the presence of known SNPs in variant protein D11853_PEA_{—}1_P24 (SEQ ID NO:602) sequence provides support for the deduced sequence of this variant protein according to the present invention).

[2239] Variant protein D11853_PEA_{—}1_P24 (SEQ ID NO:602) is encoded by the following transcript(s): D11853_PEA_{—}1_T21 (SEQ ID NO:69), for which the sequence(s) is/are given at the end of the application. The coding portion of transcript D11853_PEA_{—}1_T21 (SEQ ID NO:69) is shown in bold; this coding portion starts at position 108 and ends at position 440. The transcript also has the following SNPs as listed in Table 35 (given according to their position on the nucleotide sequence, with the alternative nucleic acid listed; the last column indicates whether the SNP is known or not; the presence of known SNPs in variant protein D11853_PEA_{—}1_P24 (SEQ ID NO:602) sequence provides support for the deduced sequence of this variant protein according to the present invention).

[2240] As noted above, cluster D11853 features 31 segment(s), which were listed in Table 2 above and for which the sequence(s) are given at the end of the application. These segment(s) are portions of nucleic acid sequence(s) which are described herein separately because they are of particular interest. A description of each segment according to the present invention is now provided.

[2241] Segment cluster D11853_PEA_{—}1_node_{—}3 (SEQ ID NO:419) according to the present invention is supported by 24 libraries. The number of libraries was determined as previously described. This segment can be found in the following transcript(s): D11853_PEA_{—}1_T7 (SEQ ID NO:59), D11853_PEA_{—}1_T17 (SEQ ID NO:67) and D11853_PEA_{—}1_T25 (SEQ ID NO:72). Table 36 below describes the starting and ending position of this segment on each transcript.

[2242] Segment cluster D11853_PEA_{—}1_node_{—}6 (SEQ ID NO:420) according to the present invention is supported by 25 libraries. The number of libraries was determined as previously described. This segment can be found in the following transcript(s): D11853_PEA_{—}1_T7 (SEQ ID NO:59), D11853_PEA_{—}1_T8 (SEQ ID NO:60), D11853_PEA_{—}1_T17 (SEQ ID NO:67) and D11853_PEA_{—}1_T25 (SEQ ID NO:72. Table 37 below describes the starting and ending position of this segment on each transcript.

[2243] Segment cluster D11853_PEA_{—}1_node_{—}9 (SEQ ID NO:421) according to the present invention is supported by 1 libraries. The number of libraries was determined as previously described. This segment can be found in the following transcript(s): D11853_PEA_{—}1_T25 (SEQ ID NO:72). Table 38 below describes the starting and ending position of this segment on each transcript.

[2244] Segment cluster D11853_PEA_{—}1_node_{—}17 (SEQ ID NO:422) according to the present invention is supported by 3 libraries. The number of libraries was determined as previously described. This segment can be found in the following transcript(s): D11853_PEA_{—}1_T16 (SEQ ID NO:66) and D11853_PEA_{—}1_T23 (SEQ ID NO:70). Table 39 below describes the starting and ending position of this segment on each transcript.

[2245] Segment cluster D11853_PEA_{—}1_node_{—}21 (SEQ ID NO:423) according to the present invention is supported by 6 libraries. The number of libraries was determined as previously described. This segment can be found in the following transcript(s): D11853_PEA_{—}1_T19 (SEQ ID NO:68) and D11853_PEA_{—}1_T23 (SEQ ID NO:70). Table 40 below describes the starting and ending position of this segment on each transcript.

[2246] Segment cluster D11853_PEA_{—}1_node_{—}22 (SEQ ID NO:424) according to the present invention is supported by 287 libraries. The number of libraries was determined as previously described. This segment can be found in the following transcript(s): D11853_PEA_{—}1_T1 (SEQ ID NO:57), D11853_PEA_{—}1_T3 (SEQ ID NO:58), D11853_PEA_{—}1_T7 (SEQ ID NO:59), D11853_PEA_{—}1_T8 (SEQ ID NO:60), D11853_PEA_{—}1_T9 (SEQ ID NO:61), D11853_PEA_{—}1_T10 (SEQ ID NO:62), D11853_PEA_{—}1_T13 (SEQ ID NO:63), D11853_PEA_{—}1_T14 (SEQ ID NO:64), D11853_PEA_{—}1_T15 (SEQ ID NO:65) D11853_PEA_{—}1_T16 (SEQ ID NO:66), D11853_PEA_{—}1_T17 (SEQ ID NO:67), D11853_PEA_{—}1_T19 (SEQ ID NO:68), D11853_PEA_{—}1_T21 (SEQ ID NO:69), D11853_PEA_{—}1_T23 (SEQ ID NO:70), D11853_PEA_{—}1_T24 (SEQ ID NO:71) and D11853_PEA_{—}1_T25 (SEQ ID NO:72). Table 41 below describes the starting and ending position of this segment on each transcript.

[2247] Segment cluster D11853_PEA_{—}1_node_{—}23 (SEQ ID NO:425) according to the present invention is supported by 4 libraries. The number of libraries was determined as previously described. This segment can be found in the following transcript(s): D11853_PEA_{—}1_T13 (SEQ ID NO:63) and D11853_PEA_{—}1_T15 (SEQ ID NO:65). Table 42 below describes the starting and ending position of this segment on each transcript.

[2248] Segment cluster D11853_PEA_{—}1_node_{—}25 (SEQ ID NO:426) according to the present invention is supported by 11 libraries. The number of libraries was determined as previously described. This segment can be found in the following transcript(s): D11853_PEA_{—}1_T10 (SEQ ID NO:62), D11853_PEA_{—}1_T15 (SEQ ID NO:65) and D11853_PEA_{—}1_T25 (SEQ ID NO:72). Table 43 below describes the starting and ending position of this segment on each transcript.

[2249] Segment cluster D11853_PEA_{—}1_node_{—}26 (SEQ ID NO:427) according to the present invention is supported by 290 libraries. The number of libraries was determined as previously described. This segment can be found in the following transcript(s): D11853_PEA_{—}1_T1 (SEQ ID NO:57), D11853_PEA_{—}1_T3 (SEQ ID NO:58, D11853_PEA_{—}1_T7 (SEQ ID NO:59) D11853_PEA_{—}1_T8 (SEQ ID NO:60), D11853_PEA_{—}1_T9 (SEQ ID NO:61) D11853_PEA_{—}1_T10 (SEQ ID NO:62), D11853_PEA_{—}1_T13 (SEQ ID NO:63) D11853_PEA_{—}1_T15 (SEQ ID NO:65), D11853_PEA_{—}1_T16 (SEQ ID NO:66) D11853_PEA_{—}1_T17 (SEQ ID NO:67), D11853_PEA_{—}1_T19 (SEQ ID NO:68) D11853_PEA_{—}1_T21 (SEQ ID NO:69), D11853_PEA_{—}1_T23 (SEQ ID NO:70) D11853_PEA_{—}1_T24 (SEQ ID NO:71) and D11853_PEA_{—}1_T25 (SEQ ID NO:72) Table 44 below describes the starting and ending position of this segment on each transcript.

[2250] Segment cluster D11853_PEA_{—}1_node_{—}27 (SEQ ID NO:428) according to the present invention is supported by 8 libraries. The number of libraries was determined as previously described. This segment can be found in the following transcript(s): D11853_PEA_{—}1_T3 (SEQ ID NO:58) and D11853_PEA_{—}1_T25 (SEQ ID NO:72). Table 45 below describes the starting and ending position of this segment on each transcript.

[2251] Segment cluster D11853_PEA_{—}1_node_{—}30 (SEQ ID NO:429) according to the present invention is supported by 249 libraries. The number of libraries was determined as previously described. This segment can be found in the following transcript(s): D11853_PEA_{—}1_T1 (SEQ ID NO:57), D11853_PEA_{—}1_T3 (SEQ ID NO:58), D11853_PEA_{—}1_T7 (SEQ ID NO:59), D11853_PEA_{—}1_T8 (SEQ ID NO:60), D11853_PEA_{—}1_T9 (SEQ ID NO:61), D11853_PEA_{—}1_T10 (SEQ ID NO:62), D11853_PEA_{—}1_T13 (SEQ ID NO:63) D11853_PEA_{—}1_T14 (SEQ ID NO:64), D11853_PEA_{—}1_T15 (SEQ ID NO:65) D11853_PEA_{—}1_T16 (SEQ ID NO:66), D11853_PEA_{—}1_T17 (SEQ ID NO:67) D11853_PEA_{—}1_T19 (SEQ ID NO:68), D11853_PEA_{—}1_T21 (SEQ ID NO:69) D11853_PEA_{—}1_T23 (SEQ ID NO:70), D11853_PEA_{—}1_T24 (SEQ ID NO:71) D11853_PEA_{—}1_T25 (SEQ ID NO:72), D11853_PEA_{—}1_T26 (SEQ ID NO:73) and D11853_PEA_{—}1_T27 (SEQ ID NO:74). Table 46 below describes the starting and ending position of this segment on each transcript.

[2252] Segment cluster D11853_PEA_{—}1_node_{—}32 (SEQ ID NO:430) according to the present invention is supported by 215 libraries. The number of libraries was determined as previously described. This segment can be found in the following transcript(s): D11853_PEA_{—}1_T1 (SEQ ID NO:57), D11853_PEA_{—}1_T3 (SEQ ID NO:58), D11853_PEA_{—}1_T7 (SEQ ID NO:59), D11853_PEA_{—}1_T8 (SEQ ID NO:60), D11853_PEA_{—}1_T9 (SEQ ID NO:61) D11853_PEA_{—}1_T10 (SEQ ID NO:62), D11853_PEA_{—}1_T13 (SEQ ID NO:63) D11853_PEA_{—}1_T14 (SEQ ID NO:64), D11853_PEA_{—}1_T15 (SEQ ID NO:65), D11853_PEA_{—}1_T16 (SEQ ID NO:66), D11853_PEA_{—}1_T17 (SEQ ID NO:67), D11853_PEA_{—}1_T19 (SEQ ID NO:68), D11853_PEA_{—}1_T21 (SEQ ID NO:69), D11853_PEA_{—}1_T23 (SEQ ID NO:70), D11853_PEA_{—}1_T24 (SEQ ID NO:71), D11853_PEA_{—}1_T25 (SEQ ID NO:72), D11853_PEA_{—}1_T26 (SEQ ID NO:73) and D11853_PEA_{—}1_T27 (SEQ ID NO:74). Table 47 below describes the starting and ending position of this segment on each transcript.

[2253] According to an optional embodiment of the present invention, short segments related to the above cluster are also provided. These segments are up to about 120 bp in length, and so are included in a separate description.

[2254] Segment cluster D11853_PEA_{—}1_node_{—}0 (SEQ ID NO:431) according to the present invention is supported by 14 libraries. The number of libraries was determined as previously described. This segment can be found in the following transcript(s): D11853_PEA_{—}1_T1 (SEQ ID NO:57, D11853_PEA_{—}1_T3 (SEQ ID NO:58), D11853_PEA_{—}1_T7 (SEQ ID NO:59), D11853_PEA_{—}1_T8 (SEQ ID NO:60), D11853_PEA_{—}1_T9 (SEQ ID NO:61) D11853_PEA_{—}1_T10 (SEQ ID NO:62), D11853_PEA_{—}1_T13 (SEQ ID NO:63), D11853_PEA_{—}1_T14 (SEQ ID NO:64), D11853_PEA_{—}1_T15 (SEQ ID NO:65), D11853_PEA_{—}1_T16 (SEQ ID NO:66), D11853_PEA_{—}1_T17 (SEQ ID NO:67), D11853_PEA_{—}1_T19 (SEQ ID NO:68), D11853_PEA_{—}1_T21 (SEQ ID NO:69), D11853_PEA_{—}1_T23 (SEQ ID NO:70), D11853_PEA_{—}1_T24 (SEQ ID NO:71), D11853_PEA_{—}1_T25 (SEQ ID NO:72), D11853_PEA_{—}1_T26 (SEQ ID NO:73) and D11853_PEA_{—}1_T27 (SEQ ID NO:74). Table 48 below describes the starting and ending position of this segment on each transcript.

[2255] Segment cluster D11853_PEA_{—}1_node_{—}1 (SEQ ID NO:432) according to the present invention is supported by 158 libraries. The number of libraries was determined as previously described. This segment can be found in the following transcript(s): D11853_PEA_{—}1_T1 (SEQ ID NO:57, D11853_PEA_{—}1_T3 (SEQ ID NO:58), D11853_PEA_{—}1_T7 (SEQ ID NO:59), D11853_PEA_{—}1_T8 (SEQ ID NO:60), D11853_PEA_{—}1_T9 (SEQ ID NO:61) D11853_PEA_{—}1_T10 (SEQ ID NO:62), D11853_PEA_T13 (SEQ ID NO:63) D11853_PEA_{—}1_T14 (SEQ ID NO:64), D11853_PEA_{—}1_T15 (SEQ ID NO:65), D11853_PEA_{—}1_T16 (SEQ ID NO:66), D11853_PEA_T17 (SEQ ID NO:67), D11853_PEA_{—}1_T19 (SEQ ID NO:68), D11853_PEA_{—}1_T21 (SEQ ID NO:69) D11853_PEA_{—}1_T23 (SEQ ID NO:70), D11853_PEA_{—}1_T24 (SEQ ID NO:71), D11853_PEA_{—}1_T25 (SEQ ID NO:72), D11853_PEA_{—}1_T26 (SEQ ID NO:73) and D11853_PEA_{—}1_T27 (SEQ ID NO:74). Table 49 below describes the starting and ending position of this segment on each transcript.

[2256] Segment cluster D11853_PEA_{—}1_node_{—}2 (SEQ ID NO:433) according to the present invention is supported by 247 libraries. The number of libraries was determined as previously described. This segment can be found in the following transcript(s): D11853_PEA_{—}1_T1 (SEQ ID NO:57), D11853_PEA_{—}1_T3 (SEQ ID NO:58), D11853_PEA_{—}1_T7 (SEQ ID NO:59), D11853_PEA_{—}1_T8 (SEQ ID NO:60), D11853_PEA_{—}1_T9 (SEQ ID NO:61) D11853_PEA_{—}1_T10 (SEQ ID NO:62), D11853_PEA_{—}1_T13 (SEQ ID NO:63) D11853_PEA_{—}1_T14 (SEQ ID NO:64), D11853_PEA_{—}1_T15 (SEQ ID NO:65) D11853_PEA_{—}1_T16 (SEQ ID NO:66), D11853_PEA_{—}1_T17 (SEQ ID NO:67) D11853_PEA_{—}1_T19 (SEQ ID NO:68), D11853_PEA_{—}1_T21 (SEQ ID NO:69) D11853_PEA_{—}1_T23 (SEQ ID NO:70), D11853_PEA_{—}1_T24 (SEQ ID NO:71), D11853_PEA_{—}1_T25 (SEQ ID NO:72), D11853_PEA_{—}1_T26 (SEQ ID NO:73) and D11853_PEA_{—}1_T27 (SEQ ID NO:74). Table 50 below describes the starting and ending position of this segment on each transcript.

[2257] Segment cluster D11853_PEA_{—}1_node_{—}4 (SEQ ID NO:434) according to the present invention is supported by 258 libraries. The number of libraries was determined as previously described. This segment can be found in the following transcript(s): D11853_PEA_{—}1_T1 (SEQ ID NO:57), D11853_PEA_{—}1_T3 (SEQ ID NO:58), D11853_PEA_{—}1_T7 (SEQ ID NO:59), D11853_PEA_{—}1_T8 (SEQ ID NO:60), D11853_PEA_{—}1_T9 (SEQ ID NO:61), D11853_PEA_{—}1_T10 (SEQ ID NO:62), D11853_PEA_{—}1_T13 (SEQ ID NO:63), D11853_PEA_{—}1_T14 (SEQ ID NO:64), D11853_PEA_{—}1_T15 (SEQ ID NO:65), D11853_PEA_{—}1_T16 (SEQ ID NO:66), D11853_PEA_{—}1_T17 (SEQ ID NO:67), D11853_PEA_{—}1_T19 (SEQ ID NO:68), D11853_PEA_{—}1_T21 (SEQ ID NO:69), D11853_PEA_{—}1_T23 (SEQ ID NO:70), D11853_PEA_{—}1_T24 (SEQ ID NO:71), D11853_PEA_{—}1_T25 (SEQ ID NO:72), D11853_PEA_{—}1_T26 (SEQ ID NO:73) and D11853_PEA_{—}1_T27 (SEQ ID NO:74). Table 51 below describes the starting and ending position of this segment on each transcript.

[2258] Segment cluster D11853_PEA_{—}1_node_{—}5 (SEQ ID NO:435) according to the present invention is supported by 291 libraries. The number of libraries was determined as previously described. This segment can be found in the following transcript(s): D11853_PEA_{—}1_T1 (SEQ ID NO:57), D11853_PEA_{—}1_T3 (SEQ ID NO:58), D11853_PEA_{—}1_T7 (SEQ ID NO:59), D11853_PEA_{—}1_T8 (SEQ ID NO:60), D11853_PEA_{—}1_T9 (SEQ ID NO:61) D11853_PEA_{—}1_T10 (SEQ ID NO:62), D11853_PEA_{—}1_T13 (SEQ ID NO:63) D11853_PEA_{—}1_T14 (SEQ ID NO:64), D11853_PEA_{—}1_T15 (SEQ ID NO:65) D11853_PEA_{—}1_T16 (SEQ ID NO:66), D11853_PEA_{—}1_T17 (SEQ ID NO:67) D11853_PEA_{—}1_T19 (SEQ ID NO:68), D11853_PEA_{—}1_T21 (SEQ ID NO:69) D11853_PEA_{—}1_T23 (SEQ ID NO:70), D11853_PEA_{—}1_T24 (SEQ ID NO:71), D11853_PEA_{—}1_T25 (SEQ ID NO:72), D11853_PEA_{—}1_T26 (SEQ ID NO:73) and D11853_PEA_{—}1_T27 (SEQ ID NO:74). Table 52 below describes the starting and ending position of this segment on each transcript.

[2259] Segment cluster D11853_PEA_{—}1_node_{—}7 (SEQ ID NO:436) according to the present invention is supported by 20 libraries. The number of libraries was determined as previously described. This segment can be found in the following transcript(s): D11853_PEA_{—}1_T7 (SEQ ID NO:59), D11853_PEA_{—}1_T8 (SEQ ID NO:60), D11853_PEA_{—}1_T9 (SEQ ID NO:61) D11853_PEA_{—}1_T17 (SEQ ID NO:67) and D11853_PEA_{—}1_T25 (SEQ ID NO:72). Table 53 below describes the starting and ending position of this segment on each transcript.

[2260] Segment cluster D11853_PEA_{—}1_node_{—}8 (SEQ ID NO:437) according to the present invention is supported by 304 libraries. The number of libraries was determined as previously described. This segment can be found in the following transcript(s): D11853_PEA_{—}1_T1 (SEQ ID NO:57), D11853_PEA_{—}1_T3 (SEQ ID NO:58), D11853_PEA_{—}1_T7 (SEQ ID NO:59), D11853_PEA_{—}1_T8 (SEQ ID NO:60), D11853_PEA_{—}1_T9 (SEQ ID NO:61) D11853_PEA_{—}1_T10 (SEQ ID NO:62), D11853_PEA_{—}1_T13 (SEQ ID NO:63) D11853_PEA_{—}1_T14 (SEQ ID NO:64), D11853_PEA_{—}1_T15 (SEQ ID NO:65) D11853_PEA_{—}1_T16 (SEQ ID NO:66), D11853_PEA_{—}1_T17 (SEQ ID NO:67) D11853_PEA_{—}1_T19 (SEQ ID NO:68), D11853_PEA_{—}1_T21 (SEQ ID NO:69) D11853_PEA_{—}1_T23 (SEQ ID NO:70), D11853_PEA_{—}1_T24 (SEQ ID NO:71) D11853_PEA_{—}1_T25 (SEQ ID NO:72), D11853_PEA_{—}1_T26 (SEQ ID NO:73) and D11853_PEA_{—}1_T27 (SEQ ID NO:74). Table 54 below describes the starting and ending position of this segment on each transcript.

[2261] Segment cluster D11853_PEA_{—}1_node_{—}10 (SEQ ID NO:438) according to the present invention is supported by 237 libraries. The number of libraries was determined as previously described. This segment can be found in the following transcript(s): D11853_PEA_{—}1_T1 (SEQ ID NO:57), D11853_PEA_{—}1_T3 (SEQ ID NO:58, D11853_PEA_{—}1_T7 (SEQ ID NO:59), D11853_PEA_{—}1_T8 (SEQ ID NO:60), D11853_PEA_{—}1_T9 (SEQ ID NO:61), D11853_PEA_{—}1_T10 (SEQ ID NO:62), D11853_PEA_{—}1_T13 (SEQ ID NO:63) D11853_PEA_{—}1_T14 (SEQ ID NO:64), D11853_PEA_{—}1_T15 (SEQ ID NO:65) D11853_PEA_{—}1_T16 (SEQ ID NO:66), D11853_PEA_{—}1_T17 (SEQ ID NO:67), D11853_PEA_{—}1_T19 (SEQ ID NO:68), D11853_PEA_{—}1_T23 (SEQ ID NO:70), D11853_PEA_{—}1_T24 (SEQ ID NO:71), D11853_PEA_{—}1_T25 (SEQ ID NO:72), D11853_PEA_{—}1_T26 (SEQ ID NO:73) and D11853_PEA_{—}1_T27 (SEQ ID NO:74). Table 55 below describes the starting and ending position of this segment on each transcript.

[2262] Segment cluster D11853_PEA_{—}1_node_{—}12 (SEQ ID NO:439) according to the present invention is supported by 239 libraries. The number of libraries was determined as previously described. This segment can be found in the following transcript(s): D11853_PEA_{—}1_T1 (SEQ ID NO:57), D11853_PEA_{—}1_T3 (SEQ ID NO:58), D11853_PEA_{—}1_T7 (SEQ ID NO:59), D11853_PEA_{—}1_T8 (SEQ ID NO:60), D11853_PEA_{—}1_T9 (SEQ ID NO:61), D11853_PEA_{—}1_T10 (SEQ ID NO:62), D11853_PEA_{—}1_T13 (SEQ ID NO:63), D11853_PEA_{—}1_T14 (SEQ ID NO:64), D11853_PEA_{—}1_T15 (SEQ ID NO:65), D11853_PEA_{—}1_T16 (SEQ ID NO:66), D11853_PEA_{—}1_T17 (SEQ ID NO:67), D11853_PEA_{—}1_T19 (SEQ ID NO:68), D11853_PEA_{—}1_T23 (SEQ ID NO:70), D11853_PEA_{—}1_T24 (SEQ ID NO:71), D11853_PEA_{—}1_T25 (SEQ ID NO:72), D11853_PEA_{—}1_T26 (SEQ ID NO:73) and D11853_PEA_{—}1_T27 (SEQ ID NO:74). Table 56 below describes the starting and ending position of this segment on each transcript.

[2263] Segment cluster D11853_PEA_{—}1_node_{—}13 (SEQ ID NO:440) according to the present invention can be found in the following transcript(s): D11853_PEA_{—}1_T1 (SEQ ID NO:57, D11853_PEA_{—}1_T3 (SEQ ID NO:58), D11853_PEA_{—}1_T7 (SEQ ID NO:59) D11853_PEA_{—}1_T8 (SEQ ID NO:60), D11853_PEA_{—}1_T9 (SEQ ID NO:61) D11853_PEA_{—}1_T10 (SEQ ID NO:62), D11853_PEA_{—}1_T13 (SEQ ID NO:63) D11853_PEA_{—}1_T14 (SEQ ID NO:64), D11853_PEA_{—}1_T15 (SEQ ID NO:65) D11853_PEA_{—}1_T16 (SEQ ID NO:66), D11853_PEA_{—}1_T17 (SEQ ID NO:67) D11853_PEA_{—}1_T19 (SEQ ID NO:68), D11853_PEA_{—}1_T23 (SEQ ID NO:70) D11853_PEA_{—}1_T24 (SEQ ID NO:71), D11853_PEA_{—}1_T25 (SEQ ID NO:72), D11853_PEA_{—}1_T26 (SEQ ID NO:73) and D11853_PEA_{—}1_T27 (SEQ ID NO:74). Table 57 below describes the starting and ending position of this segment on each transcript.

[2264] Segment cluster D11853_PEA_{—}1_node_{—}14 (SEQ ID NO:441) according to the present invention can be found in the following transcript(s): D11853_PEA_{—}1_T1 (SEQ ID NO:57), D11853_PEA_{—}1_T3 (SEQ ID NO:58), D11853_PEA_{—}1_T7 (SEQ ID NO:59) D11853_PEA_{—}1_T8 (SEQ ID NO:60), D11853_PEA_{—}1_T9 (SEQ ID NO:61) D11853_PEA_{—}1_T10 (SEQ ID NO:62), D11853_PEA_{—}1_T13 (SEQ ID NO:63) D11853_PEA_{—}1_T14 (SEQ ID NO:64), D11853_PEA_{—}1_T15 (SEQ ID NO:65) D11853_PEA_{—}1_T16 (SEQ ID NO:66), D11853_PEA_{—}1_T17 (SEQ ID NO:67) D11853_PEA_{—}1_T19 (SEQ ID NO:68), D11853_PEA_{—}1_T23 (SEQ ID NO:70) D11853_PEA_{—}1_T24 (SEQ ID NO:71), D11853_PEA_{—}1_T25 (SEQ ID NO:72) D11853_PEA_{—}1_T26 (SEQ ID NO:73) and D11853_PEA_{—}1_T27 (SEQ ID NO:74). Table 58 below describes the starting and ending position of this segment on each transcript.

[2265] Segment cluster D11853_PEA_{—}1_node_{—}15 (SEQ ID NO:442) according to the present invention can be found in the following transcript(s): D11853_PEA_{—}1_T1 (SEQ ID NO:57), D11853_PEA_{—}1_T3 (SEQ ID NO:58), D11853_PEA_{—}1_T7 (SEQ ID NO:59), D11853_PEA_{—}1_T8 (SEQ ID NO:60), D11853_PEA_{—}1_T9 (SEQ ID NO:61), D11853_PEA_{—}1_T10 (SEQ ID NO:62), D11853_PEA_{—}1_T13 (SEQ ID NO:63) D11853_PEA_{—}1_T14 (SEQ ID NO:64), D11853_PEA_{—}1_T15 (SEQ ID NO:65) D11853_PEA_{—}1_T16 (SEQ ID NO:66), D11853_PEA_{—}1_T17 (SEQ ID NO:67), D11853_PEA_{—}1_T19 (SEQ ID NO:68), D11853_PEA_{—}1_T23 (SEQ ID NO:70), D11853_PEA_{—}1_T24 (SEQ ID NO:71), D11853_PEA_{—}1_T25 (SEQ ID NO:72), D11853_PEA_{—}1_T26 (SEQ ID NO:73) and D11853_PEA_{—}1_T27 (SEQ ID NO:74). Table 59 below describes the starting and ending position of this segment on each transcript.

[2266] Segment cluster D11853_PEA_{—}1_node_{—}16 (SEQ ID NO:443) according to the present invention can be found in the following transcript(s): D11853_PEA_{—}1_T1 (SEQ ID NO:57), D11853_PEA_{—}1_T3 (SEQ ID NO:58), D11853_PEA_{—}1_T7 (SEQ ID NO:59) D11853_PEA_{—}1_T8 (SEQ ID NO:60), D11853_PEA_{—}1_T9 (SEQ ID NO:61), D11853_PEA_{—}1_T10 (SEQ ID NO:62), D11853_PEA_{—}1_T13 (SEQ ID NO:63), D11853_PEA_{—}1_T14 (SEQ ID NO:64), D11853_PEA_{—}1_T15 (SEQ ID NO:65), D11853_PEA_{—}1_T16 (SEQ ID NO:66), D11853_PEA_{—}1_T17 (SEQ ID NO:67), D11853_PEA_{—}1_T19 (SEQ ID NO:68), D11853_PEA_{—}1_T23 (SEQ ID NO:70), D11853_PEA_{—}1_T24 (SEQ ID NO:71), D11853_PEA_{—}1_T25 (SEQ ID NO:72) and D11853_PEA_{—}1_T26 (SEQ ID NO:73). Table 60 below describes the starting and ending position of this segment on each transcript.

[2267] Segment cluster D11853_PEA_{—}1_node_{—}18 (SEQ ID NO:444) according to the present invention is supported by 230 libraries. The number of libraries was determined as previously described. This segment can be found in the following transcript(s): D11853_PEA_{—}1_T1 (SEQ ID NO:57), D11853_PEA_{—}1_T3 (SEQ ID NO:58, D11853_PEA_{—}1_T7 (SEQ ID NO:59), D11853_PEA_{—}1_T8 (SEQ ID NO:60), D11853_PEA_{—}1_T9 (SEQ ID NO:61), D11853_PEA_{—}1_T10 (SEQ ID NO:62), D11853_PEA_{—}1_T13 (SEQ ID NO:63), D11853_PEA_{—}1_T14 (SEQ ID NO:64), D111853_PEA_{—}1_T15 (SEQ ID NO:65), D11853_PEA_{—}1_T16 (SEQ ID NO:66), D11853_PEA_{—}1_T17 (SEQ ID NO:67), D11853_PEA_{—}1_T19 (SEQ ID NO:68), D11853_PEA_{—}1_T21 (SEQ ID NO:69), D11853_PEA_{—}1_T23 (SEQ ID NO:70), D11853_PEA_{—}1_T25 (SEQ ID NO:72) and D11853_PEA_{—}1_T26 (SEQ ID NO:73). Table 61 below describes the starting and ending position of this segment on each transcript.

[2268] Segment cluster D11853_PEA_{—}1_node_{—}19 (SEQ ID NO:445) according to the present invention can be found in the following transcript(s): D11853_PEA_{—}1_T1 (SEQ ID NO:57), D11853_PEA_{—}1_T3 (SEQ ID NO:58), D11853_PEA_{—}1_T7 (SEQ ID NO:59) D11853_PEA_{—}1_T8 (SEQ ID NO:60), D11853_PEA_{—}1_T9 (SEQ ID NO:61), D11853_PEA_{—}1_T10 (SEQ ID NO:62), D11853_PEA_{—}1_T13 (SEQ ID NO:63), D11853_PEA_{—}1_T14 (SEQ ID NO:64), D11853_PEA_{—}1_T15 (SEQ ID NO:65) D11853_PEA_{—}1_T16 (SEQ ID NO:66), D11853_PEA_{—}1_T17 (SEQ ID NO:67) D11853_PEA_{—}1_T19 (SEQ ID NO:68), D11853_PEA_{—}1_T21 (SEQ ID NO:69) D11853_PEA_{—}1_T23 (SEQ ID NO:70) and D11853_PEA_{—}1_T25 (SEQ ID NO:72). Table 62 below describes the starting and ending position of this segment on each transcript.

[2269] Segment cluster D11853_PEA_{—}1_node_{—}20 (SEQ ID NO:446) according to the present invention is supported by 257 libraries. The number of libraries was determined as previously described. This segment can be found in the following transcript(s): D11853_PEA_{—}1_T1 (SEQ ID NO:57), D11853_PEA_{—}1_T3 (SEQ ID NO:58), D11853_PEA_{—}1_T7 (SEQ ID NO:59), D11853_PEA_{—}1_T8 (SEQ ID NO:60), D11853_PEA_{—}1_T9 (SEQ ID NO:61) D11853_PEA_{—}1_T10 (SEQ ID NO:62), D11853_PEA_{—}1_T13 (SEQ ID NO:63) D11853_PEA_{—}1_T14 (SEQ ID NO:64), D11853_PEA_{—}1_T15 (SEQ ID NO:65) D11853_PEA_{—}1_T16 (SEQ ID NO:66), D11853_PEA_{—}1_T17 (SEQ ID NO:67) D11853_PEA_{—}1_T19 (SEQ ID NO:68), D11853_PEA_{—}1_T21 (SEQ ID NO:69) D11853_PEA_{—}1_T23 (SEQ ID NO:70) and D11853_PEA_{—}1_T25 (SEQ ID NO:72). Table 63 below describes the starting and ending position of this segment on each transcript.

[2270] Segment cluster D11853_PEA_{—}1_node_{—}24 (SEQ ID NO:447) according to the present invention is supported by 254 libraries. The number of libraries was determined as previously described. This segment can be found in the following transcript(s): D11853_PEA_{—}1_T1 (SEQ ID NO:57), D11853_PEA_{—}1_T3 (SEQ ID NO:58), D11853_PEA_{—}1_T7 (SEQ ID NO:59), D11853_PEA_{—}1_T8 (SEQ ID NO:60), D11853_PEA_{—}1_T9 (SEQ ID NO:61), D11853_PEA_{—}1_T10 (SEQ ID NO:62), D11853_PEA_{—}1_T13 (SEQ ID NO:63) D11853_PEA_{—}1_T14 (SEQ ID NO:64), D11853_PEA_{—}1_T15 (SEQ ID NO:65) D11853_PEA_{—}1_T16 (SEQ ID NO:66), D11853_PEA_{—}1_T17 (SEQ ID NO:67) D11853_PEA_{—}1_T19 (SEQ ID NO:68), D11853_PEA_{—}1_T21 (SEQ ID NO:69), D11853_PEA_{—}1_T23 (SEQ ID NO:70), D11853_PEA_{—}1_T24 (SEQ ID NO:71) and D11853_PEA_{—}1_T25 (SEQ ID NO:72). Table 64 below describes the starting and ending position of this segment on each transcript.

[2271] Segment cluster D11853_PEA_{—}1_node_{—}28 (SEQ ID NO:448) according to the present invention can be found in the following transcript(s): D11853_PEA_{—}1_T3 (SEQ ID NO:58) D11853_PEA_{—}1_T25 (SEQ ID NO:72) and D11853_PEA_{—}1_T26 (SEQ ID NO:73). Table 65 below describes the starting and ending position of this segment on each transcript.

[2272] Segment cluster D11853_PEA_{—}1_node_{—}29 (SEQ ID NO:449) according to the present invention is supported by 248 libraries. The number of libraries was determined as previously described. This segment can be found in the following transcript(s): D11853_PEA_{—}1_T1 (SEQ ID NO:57), D11853_PEA_{—}1_T3 (SEQ ID NO:58, D11853_PEA_{—}1_T7 (SEQ ID NO:59), D11853_PEA_{—}1_T8 (SEQ ID NO:60), D11853_PEA_{—}1_T9 (SEQ ID NO:61), D11853_PEA_{—}1_T10 (SEQ ID NO:62), D11853_PEA_{—}1_T13 (SEQ ID NO:63), D11853_PEA_{—}1_T14 (SEQ ID NO:64), D11853_PEA_{—}1_T15 (SEQ ID NO:65), D11853_PEA_{—}1_T16 (SEQ ID NO:66), D11853_PEA_{—}1_T17 (SEQ ID NO:67), D11853_PEA_{—}1_T19 (SEQ ID NO:68), D11853_PEA_{—}1_T21 (SEQ ID NO:69), D11853_PEA_{—}1_T23 (SEQ ID NO:70), D11853_PEA_{—}1_T24 (SEQ ID NO:71), D11853_PEA_{—}1_T25 (SEQ ID NO:72) and D11853_PEA_{—}1_T26 (SEQ ID NO:73). Table 66 below describes the starting and ending position of this segment on each transcript.

Variant protein alignment to the previously known protein:

Sequence name: Q9P₀₄₂ (SEQ ID NO:639)

Sequence Documentation:

Alignment of: D11853_PEA_{—}1_P1 (SEQ ID NO:588)×Q9P₀₄₂ (SEQ ID NO:639) ••

Alignment segment 1/1:

Alignment:

Sequence name: BAC85377 (SEQ ID NO:640)

Sequence Documentation:

Alignment of: D11853_PEA_{—}1_P1 (SEQ ID NO:588)×BAC85377 (SEQ ID NO:640) ••

Alignment segment 1/1:

Alignment:

Sequence name: Q96FY2 (SEQ ID NO:638)

Sequence Documentation:

Alignment of: D11853_PEA_{—}1_P1 (SEQ ID NO:588)×Q96FY2 (SEQ ID NO:638) ••

Alignment segment 1/1:

Alignment:

Sequence name: Q9P₀₄₂ (SEQ ID NO:639)

Sequence Documentation:

Alignment of: D11853_PEA_{—}1_P2 (SEQ ID NO:589)×Q9P₀₄₂ (SEQ ID NO:639) ••

Alignment segment 1/1:

Alignment:

Sequence name: BAC85377 (SEQ ID NO:640)

Sequence Documentation:

Alignment of: D11853_PEA_{—}1_{—P}2 (SEQ ID NO:589)×BAC85377 (SEQ ID NO:640) ••

Alignment segment 1/1:

Alignment:

Sequence name: Q96FY2 (SEQ ID NO:638)

Sequence Documentation:

Alignment of: D11853_PEA_{—}1_P2 (SEQ ID NO:589)×Q96FY2 (SEQ ID NO:638) ••

Alignment segment 1/1:

Alignment:

Sequence name: Q9UJZ1 (SEQ ID NO:637)

Sequence Documentation:

Alignment of: D11853_PEA_{—}1_P2 (SEQ ID NO:589)×Q9UJZ1 (SEQ ID NO:637) ••

Alignment segment 1/1:

Alignment:

Sequence name: Q9P₀₄₂ (SEQ ID NO:639)

Sequence Documentation:

Alignment of: D11853_PEA_{—}1_P7 (SEQ ID NO:590)×Q9P₀₄₂ (SEQ ID NO:639) ••

Alignment segment 1/1:

Alignment:

Sequence name: BAC85377 (SEQ ID NO:640)

Sequence Documentation:

Alignment of: D11853_PEA_{—}1_P7 (SEQ ID NO:590)×BAC85377 (SEQ ID NO:640) ••

Alignment segment 1/1:

Alignment:

Sequence name: Q96FY2 (SEQ ID NO:638)

Sequence Documentation:

Alignment of: D11853_PEA_{—}1_P7 (SEQ ID NO:590)×Q96FY2 (SEQ ID NO:638) ••

Alignment segment 1/1:

Alignment:

Sequence name: Q9UJZ1 (SEQ ID NO:637)

Sequence Documentation:

Alignment of: D11853_PEA_{—}1_P7 (SEQ ID NO:590)×Q9UJZ1 (SEQ ID NO:637) ••

Alignment segment 1/1:

Alignment:

Sequence name: Q9P₀₄₂ (SEQ ID NO:639)

Sequence Documentation:

Alignment of: D11853_PEA_{—}1_P9 (SEQ ID NO:591)×Q9P₀₄₂ (SEQ ID NO:639) ••

Alignment segment 1/1:

Alignment:

Sequence name: BAC85377 (SEQ ID NO:640)

Sequence Documentation:

Alignment of: D11853_PEA_{—}1_P9 (SEQ ID NO:591)×BAC85377 (SEQ ID NO:640) ••

Alignment segment 1/1:

Alignment:

Sequence name: Q96FY2 (SEQ ID NO:638)

Sequence Documentation:

Alignment of: D11853_PEA_{—}1_P9 (SEQ ID NO:591)×Q96FY2 (SEQ ID NO:638) ••

Alignment segment 1/1:

Alignment:

Sequence name: Q9UJZ1 (SEQ ID NO:637)

Sequence Documentation:

Alignment of: D11853_PEA_{—}1_P9 (SEQ ID NO:591)×Q9UJZ1 (SEQ ID NO:637) ••

Alignment segment 1/1:

Alignment:

Sequence name: Q9P₀₄₂ (SEQ ID NO:639)

Sequence Documentation:

Alignment of: D11853_PEA_{—}1_P10 (SEQ ID NO:592)×Q9P₀₄₂ (SEQ ID NO:639) ••

Alignment segment 1/1:

Alignment:

Sequence name: BAC85377 (SEQ ID NO:640)

Sequence Documentation:

Alignment of: D11853_PEA_{—}1_P10 (SEQ ID NO:592)×BAC85377 (SEQ ID NO:640) ••

Alignment segment 1/1:

Alignment:

Sequence name: Q96FY2 (SEQ ID NO:638)

Sequence Documentation:

Alignment of: D11853_PEA_{—}1_P10 (SEQ ID NO:592)×Q96FY2 (SEQ ID NO:638) ••

Alignment segment 1/1:

Alignment:

Sequence name: Q9UJZ1 (SEQ ID NO:637)

Sequence Documentation:

Alignment of: D11853_PEA_{—}1_P10 (SEQ ID NO:592)×Q9UJZ1 (SEQ ID NO:637) ••

Alignment segment 1/1:

Alignment:

Sequence name: Q9P₀₄₂ (SEQ ID NO:639)

Sequence Documentation:

Alignment of: D11853_PEA_{—}1_P11 (SEQ ID NO:593)×Q9P₀₄₂ (SEQ ID NO:639) ••

Alignment segment 1/1:

Alignment:

Sequence name: BAC85377 (SEQ ID NO:640)

Sequence Documentation:

Alignment of: D11853_PEA_{—}1_P11 (SEQ ID NO:593)×BAC85377 (SEQ ID NO:640) ••

Alignment segment 1/1:

Alignment:

Sequence name: Q96FY2 (SEQ ID NO:638)

Sequence Documentation:

Alignment of: D11853_PEA_{—}1_P11 (SEQ ID NO:593)×Q96FY2 (SEQ ID NO:638) ••

Alignment segment 1/1:

Alignment:

Sequence name: Q9UJZ1 (SEQ ID NO:637)

Sequence Documentation:

Alignment of: D11853_PEA_{—}1_P11 (SEQ ID NO:593)×Q9UJZ1 (SEQ ID NO:637) ••

Alignment segment 1/1:

Alignment:

Sequence name: Q9P₀₄₂ (SEQ ID NO:639)

Sequence Documentation:

Alignment of: D11853_PEA_{—}1_P12 (SEQ ID NO:594)×Q9P₀₄₂ (SEQ ID NO:639) ••

Alignment segment 1/1:

Alignment:

Sequence name: Q96FY2 (SEQ ID NO:638)

Sequence Documentation:

Alignment of: D11853_PEA_{—}1_P12 (SEQ ID NO:594)×Q96FY2 (SEQ ID NO:638) ••

Alignment segment 1/1:

Alignment:

Sequence name: Q9UJZ1 (SEQ ID NO:637)

Sequence Documentation:

Alignment of: D11853_PEA_{—}1_P12 (SEQ ID NO:594)×Q9UJZ1 (SEQ ID NO:637) ••

Alignment segment 1/1:

Alignment:

Sequence name: Q9P₀₄₂ (SEQ ID NO:639)

Sequence Documentation:

Alignment of: D11853_PEA_{—}1_P14 (SEQ ID NO:595)×Q9P₀₄₂ (SEQ ID NO:639) ••

Alignment segment 1/1:

Alignment:

Sequence name: Q96FY2 (SEQ ID NO:638)

Sequence Documentation:

Alignment of: D11853_PEA_{—}1_P14 (SEQ ID NO:595)×Q96FY2 (SEQ ID NO:638) ••

Alignment segment 1/1:

Alignment:

Sequence name: Q9UJZ1 (SEQ ID NO:637)

Sequence Documentation:

Alignment of: D11853_PEA_{—}1_P14 (SEQ ID NO:595)×Q9UJZ1 (SEQ ID NO:637) ••

Alignment segment 1/1:

Alignment:

Sequence name: Q9P₀₄₂ (SEQ ID NO:639)

Sequence Documentation:

Alignment of: D11853_PEA_{—}1_P16 (SEQ ID NO:596)×Q9P₀₄₂ (SEQ ID NO:639) ••

Alignment segment 1/1:

Alignment:

Sequence name: BAC85377 (SEQ ID NO:640)

Sequence Documentation:

Alignment of: D11853_PEA_P16 (SEQ ID NO:596)×BAC85377 (SEQ ID NO:640).

Alignment segment 1/1:

Alignment:

Sequence name: Q96FY2 (SEQ ID NO:638)

Sequence Documentation:

Alignment of: D11853_PEA_{—}1_P16 (SEQ ID NO:596)×Q96FY2 (SEQ ID NO:638) ••

Alignment segment 1/1:

Alignment:

Sequence name: Q9UJZ1 (SEQ ID NO:637)

Sequence Documentation:

Alignment of: D11853_PEA_{—}1_P16 (SEQ ID NO:596)×Q9UJZ1 (SEQ ID NO:637) ••

Alignment segment 1/1:

Alignment:

Sequence name: Q9P₀₄₂ (SEQ ID NO:639)

Sequence Documentation:

Alignment of: D11853_PEA_{—}1_P18 (SEQ ID NO:597)×Q9P₀₄₂ (SEQ ID NO:639) ••

Alignment segment 1/1:

Alignment:

Sequence name: Q96FY2 (SEQ ID NO:638)

Sequence Documentation:

Alignment of: D11853_PEA_{—}1_P18 (SEQ ID NO:597)×Q96FY2 (SEQ ID NO:638) ••

Alignment segment 1/1:

Alignment:

Sequence name: Q9UJZ1 (SEQ ID NO:637)

Sequence Documentation:

Alignment of: D11853_PEA_{—}1_P18 (SEQ ID NO:597)×Q9UJZ1 (SEQ ID NO:637) ••

Alignment segment 1/1:

Alignment:

Sequence name: Q9P₀₄₂ (SEQ ID NO:639)

Sequence Documentation:

Alignment of: D11853_PEA_{—}1_P19 (SEQ ID NO:598)×Q9P₀₄₂ (SEQ ID NO:639) ••

Alignment segment 1/1:

Alignment:

Sequence name: Q96FY2 (SEQ ID NO:638)

Sequence Documentation:

Alignment of: D11853_PEA_{—}1_P19 (SEQ ID NO:598)×Q96FY2 (SEQ ID NO:638) ••

Alignment segment 1/1:

Alignment:

Sequence name: Q9UJZ1 (SEQ ID NO:637)

Sequence Documentation:

Alignment of: D11853_PEA_{—}1_P19 (SEQ ID NO:598)×Q9UJZ1 (SEQ ID NO:637) ••

Alignment segment 1/1:

Alignment:

Sequence name: Q96FY2 (SEQ ID NO:638)

Sequence Documentation:

Alignment of: D11853_PEA_{—}1_P21 (SEQ ID NO:600)×Q96FY2 (SEQ ID NO:638) ••

Alignment segment 1/1:

Alignment:

Sequence name: Q9UJZ1 (SEQ ID NO:637)

Sequence Documentation:

Alignment of: D11853_PEA_{—}1_P21 (SEQ ID NO:600)×Q9UJZ1 (SEQ ID NO:637) ••

Alignment segment 1/1:

Alignment:

Sequence name: Q9P₀₄₂ (SEQ ID NO:639)

Sequence Documentation:

Alignment of: D11853_PEA_{—}1_P22 (SEQ ID NO:601)×Q9P₀₄₂ (SEQ ID NO:639) ••

Alignment segment 1/1:

Alignment:

Sequence name: Q96FY2 (SEQ ID NO:638)

Sequence Documentation:

Alignment of: D11853_PEA_{—}1_P22 (SEQ ID NO:601)×Q96FY2 (SEQ ID NO:638) ••

Alignment segment 1/1:

Alignment:

Sequence name: Q9UJZ1 (SEQ ID NO:637)

Sequence Documentation:

Alignment of: D11853_PEA_{—}1_P22 (SEQ ID NO:601)×Q9UJZ1 (SEQ ID NO:637) ••

Alignment segment 1/1:

Alignment:

Sequence name: Q9P₀₄₂ (SEQ ID NO:639)

Sequence Documentation:

Alignment of: D11853_PEA_{—}1_P24 (SEQ ID NO:602)×Q9P₀₄₂ (SEQ ID NO:639) ••

Alignment segment 1/1:

Alignment:

Sequence name: Q96FY2 (SEQ ID NO:638)

Sequence Documentation:

Alignment of: D11853_PEA_{—}1_P24 (SEQ ID NO:602)×Q96FY2 (SEQ ID NO:638) ••

Alignment segment 1/1:

Alignment:

Sequence name: Q9UJZ1 (SEQ ID NO:637)

Sequence Documentation:

Alignment of: D11853_PEA_{—}1_P24 (SEQ ID NO:602)×Q9UJZ1 (SEQ ID NO:637) ••

Alignment segment 1/1:

Alignment:

Description for Cluster R11723

[2273] Cluster R11723 features 6 transcript(s) and 26 segment(s) of interest, the names for which are given in Tables 1 and 2, respectively, the sequences themselves are given at the end of the application. The selected protein variants are given in table 3.

[2274] Cluster R11723 can be used as a diagnostic marker according to overexpression of transcripts of this cluster in cancer. Expression of such transcripts in normal tissues is also given according to the previously described methods. The term “number” in the right hand column of the table and the numbers on the y-axis of the figure below refer to weighted expression of ESTs in each category, as “parts per million” (ratio of the expression of ESTs for a particular cluster to the expression of all ESTs in that category, according to parts per million).

[2275] Overall, the following results were obtained as shown with regard to the histograms in FIG. 27 and Table 4. This cluster is overexpressed (at least at a minimum level) in the following pathological conditions: epithelial malignant tumors, a mixture of malignant tumors from different tissues and kidney malignant tumors.

[2276] As noted above, cluster R11723 features 6 transcript(s), which were listed in Table 1 above. A description of each variant protein according to the present invention is now provided.

[2277] Variant protein R11723_PEA_{—}1_P2 (SEQ ID NO:603) according to the present invention has an amino acid sequence as given at the end of the application; it is encoded by transcript(s) R11723_PEA_{—}1_T6 (SEQ ID NO:80). The location of the variant protein was determined according to results from a number of different software programs and analyses, including analyses from SignalP and other specialized programs. The variant protein is believed to be located as follows with regard to the cell: secreted. The protein localization is believed to be secreted because both signal-peptide prediction programs predict that this protein has a signal peptide, and neither trans-membrane region prediction program predicts that this protein has a trans-membrane region.

[2278] Variant protein R11723_PEA_{—}1_P2 (SEQ ID NO:603) also has the following non-silent SNPs (Single Nucleotide Polymorphisms) as listed in Table 6, (given according to their position(s) on the amino acid sequence, with the alternative amino acid(s) listed; the last column indicates whether the SNP is known or not; the presence of known SNPs in variant protein R11723_PEA_{—}1_P2 (SEQ ID NO:603) sequence provides support for the deduced sequence of this variant protein according to the present invention).

[2279] Variant protein R11723_PEA_{—}1_P2 (SEQ ID NO:603) is encoded by the following transcript(s): R11723_PEA_{—}1_T6 (SEQ ID NO:80), for which the sequence(s) is/are given at the end of the application. The coding portion of transcript R11723_PEA_{—}1_T6 (SEQ ID NO:80) is shown in bold; this coding portion starts at position 1716 and ends at position 2051. The transcript also has the following SNPs as listed in Table 7 (given according to their position on the nucleotide sequence, with the alternative nucleic acid listed; the last column indicates whether the SNP is known or not; the presence of known SNPs in variant protein R11723_PEA_{—}1_P2 (SEQ ID NO:603) sequence provides support for the deduced sequence of this variant protein according to the present invention).

[2280] Variant protein R11723_PEA_{—}1_P6 (SEQ ID NO:604) according to the present invention has an amino acid sequence as given at the end of the application; it is encoded by transcript(s) R11723_PEA_{—}1_T15 (SEQ ID NO:75). One or more alignments to one or more previously published protein sequences are given at the end of the application. A brief description of the relationship of the variant protein according to the present invention to each such aligned protein is as follows:

Comparison report between R11723_PEA_{—}1_P6 (SEQ ID NO:604) and Q8IXM0 (SEQ ID NO:1393):

[2281] 1. An isolated chimeric polypeptide encoding for R11723_PEA_{—}1_P6 (SEQ ID NO:604), comprising a first amino acid sequence being at least 70%, optionally at least 80%, preferably at least 85%, more preferably at least 90% and most preferably at least 95% homologous to a polypeptide having the sequence MWVLGIAATFCGLFLLPGFALQIQCYQCEEFQLNNDCSSPEFIVNCTVNVQDMCQKEV MEQSAGIMYRKSCASSAACLIASAGSPCRGLAPGREEQRALHKAGAVGGGVR (SEQ ID NO:1558) corresponding to amino acids 1-110 of R11723_PEA_{—}1_P6 (SEQ ID NO:604), and a second amino acid sequence being at least 90% homologous to MYAQALLVVGVLQRQAAAQHLHEHPPKLLRGHRVQERVDDRAEVEKRLREGEEDHV RPEVGPRPVVLGFGRSHDPPNLVGHPAYGQCHNNQPWADTSRRERQRKEKHSMRTQ corresponding to amino acids 1-112 of Q8IXM0, which also corresponds to amino acids 111-222 of R11723_PEA_{—}1_P6 (SEQ ID NO:604), wherein said first and second amino acid sequences are contiguous and in a sequential order.

[2282] 2. An isolated polypeptide encoding for a head of R11723_PEA_{—}1_P6 (SEQ ID NO:604), comprising a polypeptide being at least 70%, optionally at least about 80%, preferably at least about 85%, more preferably at least about 90% and most preferably at least about 95% homologous to the sequence MWVLGIAATFCGLFLLPGFALQIQCYQCEEFQLNNDCSSPEFIVNCTVNVQDMCQKEV MEQSAGIMYRKSCASSAACLIASAGSPCRGLAPGREEQRALHKAGAVGGGVR (SEQ ID NO:1558) of R11723_PEA_{—}1_P6 (SEQ ID NO:604).

Comparison report between R11723_PEA_{—}1_P6 (SEQ ID NO:604) and Q96AC2 (SEQ ID NO:1394):

[2283] 1. An isolated chimeric polypeptide encoding for R11723_PEA_{—}1_P6 (SEQ ID NO:604), comprising a first amino acid sequence being at least 90% homologous to MWVLGIAATFCGLFLLPGFALQIQCYQCEEFQLNNDCSSPEFIVNCTVNVQDMCQKEV MEQSAGIMYRKSCASSAACLIASAG corresponding to amino acids 1-83 of Q96AC2, which also corresponds to amino acids 1-83 of R11723_PEA_{—}1_P6 (SEQ ID NO:604), and a second amino acid sequence being at least 70%, optionally at least 80%, preferably at least 85%, more preferably at least 90% and most preferably at least 95% homologous to a polypeptide having the sequence SPCRGLAPGREEQRALHKAGAVGGGVRMYAQALLVVGVLQRQAAAQHLHEHPPKLL RGHRVQERVDDRAEVEKRLREGEEDHVRPEVGPRPVVLGFGRSHDPPNLVGHPAYGQ CHNNQPWADTSRRERQRKEKHSMRTQ (SEQ ID NO:1559) corresponding to amino acids 84-222 of R11723_PEA_{—}1_P6 (SEQ ID NO:604), wherein said first and second amino acid sequences are contiguous and in a sequential order.

[2284] 2. An isolated polypeptide encoding for a tail of R11723_PEA_{—}1_P6 (SEQ ID NO:604), comprising a polypeptide being at least 70%, optionally at least about 80%, preferably at least about 85%, more preferably at least about 90% and most preferably at least about 95% homologous to the sequence SPCRGLAPGREEQRALHKAGAVGGGVRMYAQALLVVGVLQRQAAAQHLHEHPPKLL RGHRVQERVDDRAEVEKRLREGEEDHVRPEVGPRPVVLGFGRSHDPPNLVGHPAYGQ CHNNQPWADTSRRERQRKEKHSMRTQ SEQ ID NO:1559) in R11723_PEA_{—}1_P6 (SEQ ID NO:604).

Comparison report between R11723_PEA_{—}1_P6 (SEQ ID NO:604) and Q8N2G4 (SEQ ID NO:1395):

[2285] 1. An isolated chimeric polypeptide encoding for R11723_PEA_{—}1_P6 (SEQ ID NO:604), comprising a first amino acid sequence being at least 90% homologous to MWVLGIAATFCGLFLLPGFALQIQCYQCEEFQLNNDCSSPEFIVNCTVNVQDMCQKEV MEQSAGIMYRKSCASSAACLIASAG corresponding to amino acids 1-83 of Q8N2G4, which also corresponds to amino acids 1-83 of R11723_PEA_{—}1_P6 (SEQ ID NO:604), and a second amino acid sequence being at least 70%, optionally at least 80%, preferably at least 85%, more preferably at least 90% and most preferably at least 95% homologous to a polypeptide having the sequence SPCRGLAPGREEQRALHKAGAVGGGVRMYAQALLVVGVLQRQAAAQHLHEHPPKLL RGHRVQERVDDRAEVEKRLREGEEDHVRPEVGPRPVVLGFGRSHDPPNLVGHPAYGQ CHNNQPWADTSRRERQRKEKHSMRTQ SEQ ID NO:1559) corresponding to amino acids 84-222 of R11723_PEA_{—}1_P6 (SEQ ID NO:604), wherein said first and second amino acid sequences are contiguous and in a sequential order.

[2286] 2. An isolated polypeptide encoding for a tail of R11723_PEA_{—}1_P6 (SEQ ID NO:604), comprising a polypeptide being at least 70%, optionally at least about 80%, preferably at least about 85%, more preferably at least about 90% and most preferably at least about 95% homologous to the sequence SPCRGLAPGREEQRALHKAGAVGGGVRMYAQALLVVGVLQRQAAAQHLHEHPPKLL RGHRVQERVDDRAEVEKRLREGEEDHVRPEVGPRPVVLGFGRSHDPPNLVGHPAYGQ CHNNQPWADTSRRERQRKEKHSMRTQ SEQ ID NO:1559) in R11723_PEA_{—}1_P6 (SEQ ID NO:604).

Comparison report between R11723_PEA_{—}1_P6 (SEQ ID NO:604) and BAC85518 (SEQ ID NO:1396):

[2287] 1. An isolated chimeric polypeptide encoding for R11723_PEA_{—}1_P6 (SEQ ID NO:604), comprising a first amino acid sequence being at least 90% homologous to MWVLGIAATFCGLFLLPGFALQIQCYQCEEFQLNNDCSSPEFIVNCTVNVQDMCQKEV MEQSAGIMYRKSCASSAACLIASAG corresponding to amino acids 24-106 of BAC85518 (SEQ ID NO:1396), which also corresponds to amino acids 1-83 of R11723_PEA_{—}1_P6 (SEQ ID NO:604), and a second amino acid sequence being at least 70%, optionally at least 80%, preferably at least 85%, more preferably at least 90% and most preferably at least 95% homologous to a polypeptide having the sequence SPCRGLAPGREEQRALHKAGAVGGGVRMYAQALLVVGVLQRQAAAQHLHEHPPKLL RGHRVQERVDDRAEVEKRLREGEEDHVRPEVGPRPVVLGFGRSHDPPNLVGHPAYGQ CHNNQPWADTSRRERQRKEKHSMRTQ SEQ ID NO:1559) corresponding to amino acids 84-222 of R11723_PEA_{—}1_P6 (SEQ ID NO:604), wherein said first and second amino acid sequences are contiguous and in a sequential order.

[2288] 2. An isolated polypeptide encoding for a tail of R11723_PEA_{—}1_P6 (SEQ ID NO:604), comprising a polypeptide being at least 70%, optionally at least about 80%, preferably at least about 85%, more preferably at least about 90% and most preferably at least about 95% homologous to the sequence SPCRGLAPGREEQRALHKAGAVGGGVRMYAQALLVVGVLQRQAAAQHLHEHPPKLL RGHRVQERVDDRAEVEKRLREGEEDHVRPEVGPRPVVLGFGRSHDPPNLVGHPAYGQ CHNNQPWADTSRRERQRKEKHSMRTQ SEQ ID NO:1559) in R11723_PEA_{—}1_P6 (SEQ ID NO:604).

[2289] The location of the variant protein was determined according to results from a number of different software programs and analyses, including analyses from SignalP and other specialized programs. The variant protein is believed to be located as follows with regard to the cell: secreted. The protein localization is believed to be secreted because both signal-peptide prediction programs predict that this protein has a signal peptide, and neither trans-membrane region prediction program predicts that this protein has a trans-membrane region.

[2290] Variant protein R11723_PEA_{—}1_P6 (SEQ ID NO:604) also has the following non-silent SNPs (Single Nucleotide Polymorphisms) as listed in Table 8, (given according to their position(s) on the amino acid sequence, with the alternative amino acid(s) listed; the last column indicates whether the SNP is known or not; the presence of known SNPs in variant protein R11723_PEA_{—}1_P6 (SEQ ID NO:604) sequence provides support for the deduced sequence of this variant protein according to the present invention).

[2291] Variant protein R11723_PEA_{—}1_P6 (SEQ ID NO:604) is encoded by the following transcript(s): R11723_PEA_{—}1_T15 (SEQ ID NO:75), for which the sequence(s) is/are given at the end of the application. The coding portion of transcript R11723_PEA_{—}1_T15 (SEQ ID NO:75) is shown in bold; this coding portion starts at position 434 and ends at position 1099. The transcript also has the following SNPs as listed in Table 9 (given according to their position on the nucleotide sequence, with the alternative nucleic acid listed; the last column indicates whether the SNP is known or not; the presence of known SNPs in variant protein R11723_PEA_{—}1_P6 (SEQ ID NO:604) sequence provides support for the deduced sequence of this variant protein according to the present invention).

[2292] Variant protein R11723_PEA_{—}1_P7 (SEQ ID NO:605) according to the present invention has an amino acid sequence as given at the end of the application; it is encoded by transcript(s) R11723_PEA_{—}1_T17 (SEQ ID NO:76). One or more alignments to one or more previously published protein sequences are given at the end of the application. A brief description of the relationship of the variant protein according to the present invention to each such aligned protein is as follows:

[2293] Comparison report between R11723_PEA_{—}1_P7 (SEQ ID NO:605) and Q96AC2 (SEQ ID NO:1394):

[2294] 1. An isolated chimeric polypeptide encoding for R11723_PEA_{—}1_P7 (SEQ ID NO:605), comprising a first amino acid sequence being at least 90% homologous to MWVLGIAATFCGLFLLPGFALQIQCYQCEEFQLNNDCSSPEFIVNCTVNVQDMCQKEV MEQSAG corresponding to amino acids 1-64 of Q96AC2 (SEQ ID NO:1394), which also corresponds to amino acids 1-64 of R11723_PEA_{—}1_P7 (SEQ ID NO:605), and a second amino acid sequence being at least 70%, optionally at least 80%, preferably at least 85%, more preferably at least 90% and most preferably at least 95% homologous to a polypeptide having the sequence SHCVTRLECSGTISAHCNLCLPGSNDHPT (SEQ ID NO:1560) corresponding to amino acids 65-93 of R11723_PEA_{—}1_P7 (SEQ ID NO:605), wherein said first and second amino acid sequences are contiguous and in a sequential order.

[2295] 2. An isolated polypeptide encoding for a tail of R11723_PEA_{—}1_P7 (SEQ ID NO:605), comprising a polypeptide being at least 70%, optionally at least about 80%, preferably at least about 85%, more preferably at least about 90% and most preferably at least about 95% homologous to the sequence SHCVTRLECSGTISAHCNLCLPGSNDHPT (SEQ ID NO:1560) in R11723_PEA_{—}1_P7 (SEQ ID NO:605).

[2296] Comparison report between R11723_PEA_{—}1_P7 (SEQ ID NO:605) and Q8N2G4 (SEQ ID NO:1395):

[2297] 1. An isolated chimeric polypeptide encoding for R11723_PEA_{—}1_P7 (SEQ ID NO:605), comprising a first amino acid sequence being at least 90% homologous to MWVLGIAATFCGLFLLPGFALQIQCYQCEEFQLNNDCSSPEFIVNCTVNVQDMCQKEV MEQSAG corresponding to amino acids 1-64 of Q8N2G4 (SEQ ID NO:1395), which also corresponds to amino acids 1-64 of R11723_PEA_{—}1_P7 (SEQ ID NO:605), and a second amino acid sequence being at least 70%, optionally at least 80%, preferably at least 85%, more preferably at least 90% and most preferably at least 95% homologous to a polypeptide having the sequence SHCVTRLECSGTISAHCNLCLPGSNDHPT (SEQ ID NO:1560) corresponding to amino acids 65-93 of R11723_PEA_{—}1_P7 (SEQ ID NO:605), wherein said first and second amino acid sequences are contiguous and in a sequential order.

[2298] 2. An isolated polypeptide encoding for a tail of R11723_PEA_{—}1_P7 (SEQ ID NO:605), comprising a polypeptide being at least 70%, optionally at least about 80%, preferably at least about 85%, more preferably at least about 90% and most preferably at least about 95% homologous to the sequence SHCVTRLECSGTISAHCNLCLPGSNDHPT (SEQ ID NO:1560) in R11723_PEA_{—}1_P7 (SEQ ID NO:605).

[2299] Comparison report between R11723_PEA_{—}1_P7 (SEQ ID NO:605) and BAC85273 (SEQ ID NO:1397):

[2300] 1. An isolated chimeric polypeptide encoding for R11723_PEA_{—}1_P7 (SEQ ID NO:605), comprising a first amino acid sequence being at least 70%, optionally at least 80%, preferably at least 85%, more preferably at least 90% and most preferably at least 95% homologous to a polypeptide having the sequence MWVLG (SEQ ID NO:1561) corresponding to amino acids 1-5 of R11723_PEA_{—}1_P7 (SEQ ID NO:605), second amino acid sequence being at least 90% homologous to IAATFCGLFLLPGFALQIQCYQCEEFQLNNDCSSPEFIVNCTVNVQDMCQKEVMEQSAG corresponding to amino acids 22-80 of BAC85273 (SEQ ID NO:1397), which also corresponds to amino acids 6-64 of R11723_PEA_{—}1_P7 (SEQ ID NO:605), and a third amino acid sequence being at least 70%, optionally at least 80%, preferably at least 85%, more preferably at least 90% and most preferably at least 95% homologous to a polypeptide having the sequence SHCVTRLECSGTISAHCNLCLPGSNDHPT (SEQ ID NO:1560) corresponding to amino acids 65-93 of R11723_PEA_{—}1_P7 (SEQ ID NO:605), wherein said first, second and third amino acid sequences are contiguous and in a sequential order.

[2301] 2. An isolated polypeptide encoding for a head of R11723_PEA_{—}1_P7 (SEQ ID NO:605), comprising a polypeptide being at least 70%, optionally at least about 80%, preferably at least about 85%, more preferably at least about 90% and most preferably at least about 95% homologous to the sequence MWVLG (SEQ ID NO:1561) of R11723_PEA_{—}1_P7 (SEQ ID NO:605).

[2302] 3. An isolated polypeptide encoding for a tail of R11723_PEA_{—}1_P7 (SEQ ID NO:605), comprising a polypeptide being at least 70%, optionally at least about 80%, preferably at least about 85%, more preferably at least about 90% and most preferably at least about 95% homologous to the sequence SHCVTRLECSGTISAHCNLCLPGSNDHPT (SEQ ID NO:1560) in R11723_PEA_{—}1_P7 (SEQ ID NO:605).

[2303] Comparison report between R11723_PEA_{—}1_P7 (SEQ ID NO:605) and BAC85518 (SEQ ID NO:1396):

[2304] 1. An isolated chimeric polypeptide encoding for R11723_PEA_{—}1_P7 (SEQ ID NO:605), comprising a first amino acid sequence being at least 90% homologous to MWVLGIAATFCGLFLLPGFALQIQCYQCEEFQLNNDCSSPEFIVNCTVNVQDMCQKEV MEQSAG corresponding to amino acids 24-87 of BAC85518 (SEQ ID NO:1396), which also corresponds to amino acids 1-64 of R11723_PEA_{—}1_P7 (SEQ ID NO:605), and a second amino acid sequence being at least 70%, optionally at least 80%, preferably at least 85%, more preferably at least 90% and most preferably at least 95% homologous to a polypeptide having the sequence SHCVTRLECSGTISAHCNLCLPGSNDHPT (SEQ ID NO:1560) corresponding to amino acids 65-93 of R11723_PEA_{—}1_P7 (SEQ ID NO:605), wherein said first and second amino acid sequences are contiguous and in a sequential order.

[2305] 2. An isolated polypeptide encoding for a tail of R11723_PEA_{—}1_P7 (SEQ ID NO:605), comprising a polypeptide being at least 70%, optionally at least about 80%, preferably at least about 85%, more preferably at least about 90% and most preferably at least about 95% homologous to the sequence SHCVTRLECSGTISAHCNLCLPGSNDHPT (SEQ ID NO:1560) in R11723_PEA_{—}1_P7 (SEQ ID NO:605).

[2306] The location of the variant protein was determined according to results from a number of different software programs and analyses, including analyses from SignalP and other specialized programs. The variant protein is believed to be located as follows with regard to the cell: secreted. The protein localization is believed to be secreted because both signal-peptide prediction programs predict that this protein has a signal peptide, and neither trans-membrane region prediction program predicts that this protein has a trans-membrane region.

[2307] Variant protein R11723_PEA_{—}1_P7 (SEQ ID NO:605) also has the following non-silent SNPs (Single Nucleotide Polymorphisms) as listed in Table 10, (given according to their position(s) on the amino acid sequence, with the alternative amino acid(s) listed; the last column indicates whether the SNP is known or not; the presence of known SNPs in variant protein R11723_PEA_{—}1_P7 (SEQ ID NO:605) sequence provides support for the deduced sequence of this variant protein according to the present invention).

[2308] Variant protein R11723_PEA_{—}1_P7 (SEQ ID NO:605) is encoded by the following transcript(s): R11723_PEA_{—}1_T17 (SEQ ID NO:76), for which the sequence(s) is/are given at the end of the application. The coding portion of transcript R11723_PEA_{—}1_T17 (SEQ ID NO:76) is shown in bold; this coding portion starts at position 434 and ends at position 712. The transcript also has the following SNPs as listed in Table 11 (given according to their position on the nucleotide sequence, with the alternative nucleic acid listed; the last column indicates whether the SNP is known or not; the presence of known SNPs in variant protein R11723_PEA_{—}1_P7 (SEQ ID NO:605) sequence provides support for the deduced sequence of this variant protein according to the present invention).

[2309] Variant protein R11723_PEA_{—}1_P13 (SEQ ID NO:606) according to the present invention has an amino acid sequence as given at the end of the application; it is encoded by transcript(s) R11723_PEA_{—}1_T19 (SEQ ID NO:77) and R11723_PEA_{—}1_T5 (SEQ ID NO:79). One or more alignments to one or more previously published protein sequences are given at the end of the application. A brief description of the relationship of the variant protein according to the present invention to each such aligned protein is as follows:

[2310] Comparison report between R11723_PEA_{—}1_P13 (SEQ ID NO:606) and Q96AC2 (SEQ ID NO:1394):

[2311] 1. An isolated chimeric polypeptide encoding for R11723_PEA_{—}1_P13 (SEQ ID NO:606) comprising a first amino acid sequence being at least 90% homologous to MWVLGIAATFCGLFLLPGFALQIQCYQCEEFQLNNDCSSPEFIVNCTVNVQDMCQKEV MEQSA corresponding to amino acids 1-63 of Q96AC2 (SEQ ID NO:1394), which also corresponds to amino acids 1-63 of R11723_PEA_{—}1_P13 (SEQ ID NO:606), and a second amino acid sequence being at least 70%, optionally at least 80%, preferably at least 85%, more preferably at least 90% and most preferably at least 95% homologous to a polypeptide having the sequence DTKRTNTLLFEMRHFAKQLTT (SEQ ID NO:1562) corresponding to amino acids 64-84 of R11723_PEA_{—}1_P13 (SEQ ID NO:606), wherein said first and second amino acid sequences are contiguous and in a sequential order.

[2312] 2. An isolated polypeptide encoding for a tail of R11723_PEA_{—}1_P13 (SEQ ID NO:606), comprising a polypeptide being at least 70%, optionally at least about 80%, preferably at least about 85%, more preferably at least about 90% and most preferably at least about 95% homologous to the sequence DTKRTNTLLFEMRHFAKQLTT (SEQ ID NO:1562) in R11723_PEA_{—}1_P13 (SEQ ID NO:606).

[2313] The location of the variant protein was determined according to results from a number of different software programs and analyses, including analyses from SignalP and other specialized programs. The variant protein is believed to be located as follows with regard to the cell: secreted. The protein localization is believed to be secreted because both signal-peptide prediction programs predict that this protein has a signal peptide, and neither trans-membrane region prediction program predicts that this protein has a trans-membrane region.

[2314] Variant protein R11723_PEA_{—}1_P13 (SEQ ID NO:606) is encoded by the following transcript(s): R11723_PEA_{—}1_T19 (SEQ ID NO:77), for which the sequence(s) is/are given at the end of the application. The coding portion of transcript R11723_PEA_{—}1_T19 (SEQ ID NO:77) is shown in bold; this coding portion starts at position 434 and ends at position 685. The transcript also has the following SNPs as listed in Table 12 (given according to their position on the nucleotide sequence, with the alternative nucleic acid listed; the last column indicates whether the SNP is known or not; the presence of known SNPs in variant protein R11723_PEA_{—}1_P13 (SEQ ID NO:606) sequence provides support for the deduced sequence of this variant protein according to the present invention).

[2315] Variant protein R11723_PEA_{—}1_P10 (SEQ ID NO:607) according to the present invention has an amino acid sequence as given at the end of the application; it is encoded by transcript(s) R11723_PEA_{—}1_T20 (SEQ ID NO:78). One or more alignments to one or more previously published protein sequences are given at the end of the application. A brief description of the relationship of the variant protein according to the present invention to each such aligned protein is as follows:

[2316] Comparison report between R11723_PEA_{—}1_P10 (SEQ ID NO:607) and Q96AC2 (SEQ ID NO:1394):

[2317] 1. An isolated chimeric polypeptide encoding for R11723_PEA_{—}1_P10 (SEQ ID NO:607) comprising a first amino acid sequence being at least 90% homologous to MWVLGIAATFCGLFLLPGFALQIQCYQCEEFQLNNDCSSPEFIVNCTVNVQDMCQKEV MEQSA corresponding to amino acids 1-63 of Q96AC2 (SEQ ID NO:1394), which also corresponds to amino acids 1-63 of R11723_PEA_{—}1_P10 (SEQ ID NO:607), and a second amino acid sequence being at least 70%, optionally at least 80%, preferably at least 85%, more preferably at least 90% and most preferably at least 95% homologous to a polypeptide having the sequence DRVSLCHEAGVQWNNFSTLQPLPPRLK (SEQ ID NO:1563) corresponding to amino acids 64-90 of R11723_PEA_{—}1_P10 (SEQ ID NO:607), wherein said first and second amino acid sequences are contiguous and in a sequential order.

[2318] 2. An isolated polypeptide encoding for a tail of R11723_PEA_{—}1_P10 (SEQ ID NO:607), comprising a polypeptide being at least 70%, optionally at least about 80%, preferably at least about 85%, more preferably at least about 90% and most preferably at least about 95% homologous to the sequence DRVSLCHEAGVQWNNFSTLQPLPPRLK (SEQ ID NO:1563) in R11723_PEA_{—}1_P10 (SEQ ID NO:607).

[2319] Comparison report between R11723_PEA_{—}1_P10 (SEQ ID NO:607) and Q8N2G4 (SEQ ID NO:1395):

[2320] 1. An isolated chimeric polypeptide encoding for R11723_PEA_{—}1_P10 (SEQ ID NO:607) comprising a first amino acid sequence being at least 90% homologous to MWVLGIAATFCGLFLLPGFALQIQCYQCEEFQLNNDCSSPEFIVNCTVNVQDMCQKEV MEQSA corresponding to amino acids 1-63 of Q8N2G4 (SEQ ID NO:1395), which also corresponds to amino acids 1-63 of R11723_PEA_{—}1_P10 (SEQ ID NO:607), and a second amino acid sequence being at least 70%, optionally at least 80%, preferably at least 85%, more preferably at least 90% and most preferably at least 95% homologous to a polypeptide having the sequence DRVSLCHEAGVQWNNFSTLQPLPPRLK (SEQ ID NO:1563) corresponding to amino acids 64-90 of R11723_PEA_{—}1_P10 (SEQ ID NO:607), wherein said first and second amino acid sequences are contiguous and in a sequential order.

[2321] 2. An isolated polypeptide encoding for a tail of R11723_PEA_{—}1_P10 (SEQ ID NO:607), comprising a polypeptide being at least 70%, optionally at least about 80%, preferably at least about 85%, more preferably at least about 90% and most preferably at least about 95% homologous to the sequence DRVSLCHEAGVQWNNFSTLQPLPPRLK (SEQ ID NO:1563) in R11723_PEA_{—}1_P10 (SEQ ID NO:607).

Comparison report between R11723_PEA_{—}1_P10 (SEQ ID NO:607) and BAC85273 (SEQ ID NO:1397) (SEQ ID NO:1397):

[2322] 1. An isolated chimeric polypeptide encoding for R11723_PEA_L_P10 (SEQ ID NO:607) comprising a first amino acid sequence being at least 70%, optionally at least 80%, preferably at least 85%, more preferably at least 90% and most preferably at least 95% homologous to a polypeptide having the sequence MWVLG (SEQ ID NO:1561) corresponding to amino acids 1-5 of R11723_PEA_{—}1_P10 (SEQ ID NO:607), second amino acid sequence being at least 90% homologous to IAATFCGLFLLPGFALQIQCYQCEEFQLNNDCSSPEFIVNCTVNVQDMCQKEVMEQSA corresponding to amino acids 22-79 of BAC85273 (SEQ ID NO:1397), which also corresponds to amino acids 6-63 of R11723_PEA_{—}1_P10 (SEQ ID NO:607), and a third amino acid sequence being at least 70%, optionally at least 80%, preferably at least 85%, more preferably at least 90% and most preferably at least 95% homologous to a polypeptide having the sequence DRVSLCHEAGVQWNNFSTLQPLPPRLK (SEQ ID NO:1563) corresponding to amino acids 64-90 of R11723_PEA_{—}1_P10 (SEQ ID NO:607), wherein said first, second and third amino acid sequences are contiguous and in a sequential order.

[2323] 2. An isolated polypeptide encoding for a head of R11723_PEA_{—}1_P10 (SEQ ID NO:607), comprising a polypeptide being at least 70%, optionally at least about 80%, preferably at least about 85%, more preferably at least about 90% and most preferably at least about 95% homologous to the sequence MWVLG (SEQ ID NO:1561) of R11723_PEA_{—}1_P10 (SEQ ID NO:607).

[2324] 3. An isolated polypeptide encoding for a tail of R11723_PEA_{—}1_P10 (SEQ ID NO:607), comprising a polypeptide being at least 70%, optionally at least about 80%, preferably at least about 85%, more preferably at least about 90% and most preferably at least about 95% homologous to the sequence DRVSLCHEAGVQWNNFSTLQPLPPRLK (SEQ ID NO:1563) in R11723_PEA_{—}1_P10 (SEQ ID NO:607).

[2325] Comparison report between R11723_PEA_{—}1_P10 (SEQ ID NO:607) and BAC85518 (SEQ ID NO:1396):

[2326] 1. An isolated chimeric polypeptide encoding for R11723_PEA_{—}1_P10 (SEQ ID NO:607) comprising a first amino acid sequence being at least 90% homologous to MWVLGIAATFCGLFLLPGFALQIQCYQCEEFQLNNDCSSPEFIVNCTVNVQDMCQKEV MEQSA corresponding to amino acids 24-86 of BAC85518 (SEQ ID NO:1396), which also corresponds to amino acids 1-63 of R11723_PEA_{—}1_P10 (SEQ ID NO:607), and a second amino acid sequence being at least 70%, optionally at least 80%, preferably at least 85%, more preferably at least 90% and most preferably at least 95% homologous to a polypeptide having the sequence DRVSLCHEAGVQWNNFSTLQPLPPRLK (SEQ ID NO:1563) corresponding to amino acids 64-90 of R11723_PEA_{—}1_P10 (SEQ ID NO:607), wherein said first and second amino acid sequences are contiguous and in a sequential order.

[2327] 2. An isolated polypeptide encoding for a tail of R11723_PEA_{—}1_P10 (SEQ ID NO:607), comprising a polypeptide being at least 70%, optionally at least about 80%, preferably at least about 85%, more preferably at least about 90% and most preferably at least about 95% homologous to the sequence DRVSLCHEAGVQWNNFSTLQPLPPRLK (SEQ ID NO:1563) in R11723_PEA_{—}1_P10 (SEQ ID NO:607).

[2328] The location of the variant protein was determined according to results from a number of different software programs and analyses, including analyses from SignalP and other specialized programs. The variant protein is believed to be located as follows with regard to the cell: secreted. The protein localization is believed to be secreted because both signal-peptide prediction programs predict that this protein has a signal peptide, and neither trans-membrane region prediction program predicts that this protein has a trans-membrane region.

[2329] Variant protein R11723_PEA_{—}1_P10 (SEQ ID NO:607) also has the following non-silent SNPs (Single Nucleotide Polymorphisms) as listed in Table 13, (given according to their position(s) on the amino acid sequence, with the alternative amino acid(s) listed; the last column indicates whether the SNP is known or not; the presence of known SNPs in variant protein R11723_PEA_{—}1_P10 (SEQ ID NO:607) sequence provides support for the deduced sequence of this variant protein according to the present invention).

[2330] Variant protein R11723_PEA_{—}1_P10 (SEQ ID NO:607) is encoded by the following transcript(s): R11723_PEA_{—}1_T20 (SEQ ID NO:78), for which the sequence(s) is/are given at the end of the application. The coding portion of transcript R11723_PEA_{—}1_T20 (SEQ ID NO:78) is shown in bold; this coding portion starts at position 434 and ends at position 703. The transcript also has the following SNPs as listed in Table 14 (given according to their position on the nucleotide sequence, with the alternative nucleic acid listed; the last column indicates whether the SNP is known or not; the presence of known SNPs in variant protein R11723_PEA_{—}1_P10 (SEQ ID NO:607) sequence provides support for the deduced sequence of this variant protein according to the present invention).

[2331] As noted above, cluster R11723 features 26 segment(s), which were listed in Table 2 above and for which the sequence(s) are given at the end of the application. These segment(s) are portions of nucleic acid sequence(s) which are described herein separately because they are of particular interest. A description of each segment according to the present invention is now provided.

[2332] Segment cluster R11723_PEA_{—}1_node_{—}13 (SEQ ID NO:450) according to the present invention is supported by 5 libraries. The number of libraries was determined as previously described. This segment can be found in the following transcript(s): R11723_PEA_{—}1_T19 (SEQ ID NO:77), R11723_PEA_{—}1_T5 (SEQ ID NO:79) and R11723_PEA_{—}1_T6 (SEQ ID NO:80). Table 15 below describes the starting and ending position of this segment on each transcript.

[2333] Segment cluster R11723_PEA_{—}1_node_{—}16 (SEQ ID NO:451) according to the present invention is supported by 3 libraries. The number of libraries was determined as previously described. This segment can be found in the following transcript(s): R11723_PEA_{—}1_T17 (SEQ ID NO:76), R11723_PEA_{—}1_T19 (SEQ ID NO:77) and R11723_PEA_{—}1_T20 (SEQ ID NO:78). Table 16 below describes the starting and ending position of this segment on each transcript.

[2334] Segment cluster R11723_PEA_{—}1_node_{—}19 (SEQ ID NO:452) according to the present invention is supported by 45 libraries. The number of libraries was determined as previously described. This segment can be found in the following transcript(s): R11723_PEA_{—}1_T5 (SEQ ID NO:79) and R11723_PEA_{—}1_T6 (SEQ ID NO:80). Table 17 below describes the starting and ending position of this segment on each transcript.

[2335] Segment cluster R11723_PEA_{—}1_node_{—}2 (SEQ ID NO:453) according to the present invention is supported by 29 libraries. The number of libraries was determined as previously described. This segment can be found in the following transcript(s): R11723_PEA_{—}1_T15 (SEQ ID NO:75), R11723_PEA_{—}1_T17 (SEQ ID NO:76, R11723_PEA_{—}1_T19 (SEQ ID NO:77), R11723_PEA_{—}1_T20 (SEQ ID NO:78), R11723_PEA_{—}1_T5 (SEQ ID NO:79) and R11723_PEA_{—}1_T6 (SEQ ID NO:80). Table 18 below describes the starting and ending position of this segment on each transcript.

[2336] Segment cluster R11723_PEA_{—}1_node_{—}22 (SEQ ID NO:454) according to the present invention is supported by 65 libraries. The number of libraries was determined as previously described. This segment can be found in the following transcript(s): R11723_PEA_{—}1_T5 (SEQ ID NO:79) and R11723_PEA_{—}1_T6 (SEQ ID NO:80). Table 19 below describes the starting and ending position of this segment on each transcript.

[2337] Segment cluster R11723_PEA_{—}1_node_{—}31 (SEQ ID NO:455) according to the present invention is supported by 70 libraries. The number of libraries was determined as previously described. This segment can be found in the following transcript(s): R11723_PEA_{—}1_T15 (SEQ ID NO:75), R11723_PEA_{—}1_T5 (SEQ ID NO:79) and R11723_PEA_{—}1_T6 (SEQ ID NO:80). Table 20 below describes the starting and ending position of this segment on each transcript (it should be noted that these transcripts show alternative polyadenylation).

[2338] According to an optional embodiment of the present invention, short segments related to the above cluster are also provided. These segments are up to about 120 bp in length, and so are included in a separate description.

[2339] Segment cluster R11723_PEA_{—}1_node_{—}10 (SEQ ID NO:456) according to the present invention is supported by 38 libraries. The number of libraries was determined as previously described. This segment can be found in the following transcript(s): R11723_PEA_{—}1_T15 (SEQ ID NO:75, R11723_PEA_{—}1_T17 (SEQ ID NO:76), R11723_PEA_{—}1_T19 (SEQ ID NO:77) R11723_PEA_{—}1_T20 (SEQ ID NO:78), R11723_PEA_{—}1_T5 (SEQ ID NO:79) and R11723_PEA_{—}1_T6 (SEQ ID NO:80). Table 21 below describes the starting and ending position of this segment on each transcript.

[2340] Segment cluster R11723_PEA_{—}1_node_{—}11 (SEQ ID NO:457) according to the present invention is supported by 42 libraries. The number of libraries was determined as previously described. This segment can be found in the following transcript(s): R11723_PEA_{—}1_T15 (SEQ ID NO:75), R11723_PEA_{—}1_T17 (SEQ ID NO:76), R11723_PEA_{—}1_T19 (SEQ ID NO:77), R11723_PEA_{—}1_T20 (SEQ ID NO:78), R11723_PEA_{—}1_T5 (SEQ ID NO:79) and R11723_PEA_{—}1_T6 (SEQ ID NO:80). Table 22 below describes the starting and ending position of this segment on each transcript.

[2341] Segment cluster R11723_PEA_{—}1_node_{—}15 (SEQ ID NO:458) according to the present invention can be found in the following transcript(s): R11723_PEA_{—}1_T20 (SEQ ID NO:78) Table 23 below describes the starting and ending position of this segment on each transcript.

[2342] Segment cluster R11723_PEA_{—}1_node_{—}18 (SEQ ID NO:459) according to the present invention is supported by 40 libraries. The number of libraries was determined as previously described. This segment can be found in the following transcript(s): R11723_PEA_{—}1_T15 (SEQ ID NO:75), R11723_PEA_{—}1_T5 (SEQ ID NO:79) and R11723_PEA_{—}1_T6 (SEQ ID NO:80). Table 24 below describes the starting and ending position of this segment on each transcript.

[2343] Segment cluster R11723_PEA_{—}1_node_{—}20 (SEQ ID NO:460) according to the present invention can be found in the following transcript(s): R11723_PEA_{—}1_T5 (SEQ ID NO:79) and R11723_PEA_{—}1_T6 (SEQ ID NO:80). Table 25 below describes the starting and ending position of this segment on each transcript.

[2344] Segment cluster R11723_PEA_{—}1_node_{—}21 (SEQ ID NO:461) according to the present invention is supported by 36 libraries. The number of libraries was determined as previously described. This segment can be found in the following transcript(s): R11723_PEA_{—}1_T5 (SEQ ID NO:79) and R11723_PEA_{—}1_T6 (SEQ ID NO:80). Table 26 below describes the starting and ending position of this segment on each transcript.

[2345] Segment cluster R11723_PEA_{—}1_node_{—}23 (SEQ ID NO:462) according to the present invention is supported by 39 libraries. The number of libraries was determined as previously described. This segment can be found in the following transcript(s): R11723_PEA_{—}1_T5 (SEQ ID NO:79) and R11723_PEA_{—}1_T6 (SEQ ID NO:80). Table 27 below describes the starting and ending position of this segment on each transcript.

[2346] Segment cluster R11723_PEA_{—}1_node_{—}24 (SEQ ID NO:463) according to the present invention is supported by 51 libraries. The number of libraries was determined as previously described. This segment can be found in the following transcript(s): R11723_PEA_{—}1_T15 (SEQ ID NO:75), R11723_PEA_{—}1_T5 (SEQ ID NO:79) and R11723_PEA_{—}1_T6 (SEQ ID NO:80). Table 28 below describes the starting and ending position of this segment on each transcript.

[2347] Segment cluster R11723_PEA_{—}1_node_{—}25 (SEQ ID NO:464) according to the present invention is supported by 54 libraries. The number of libraries was determined as previously described. This segment can be found in the following transcript(s): R11723_PEA_{—}1_T15 (SEQ ID NO:75), R11723_PEA_{—}1_T5 (SEQ ID NO:79) and R11723_PEA_{—}1_T6 (SEQ ID NO:80). Table 29 below describes the starting and ending position of this segment on each transcript.

[2348] Segment cluster R11723_PEA_{—}1_node_{—}26 (SEQ ID NO:465) according to the present invention is supported by 62 libraries. The number of libraries was determined as previously described. This segment can be found in the following transcript(s): R11723_PEA_{—}1_T15 (SEQ ID NO:75), R11723_PEA_{—}1_T5 (SEQ ID NO:79) and R11723_PEA_{—}1_T6 (SEQ ID NO:80). Table 30 below describes the starting and ending position of this segment on each transcript.

[2349] Segment cluster R11723_PEA_{—}1_node_{—}27 (SEQ ID NO:466) according to the present invention is supported by 67 libraries. The number of libraries was determined as previously described. This segment can be found in the following transcript(s): R11723_PEA_{—}1_T15 (SEQ ID NO:75), R11723_PEA_{—}1_T5 (SEQ ID NO:79) and R11723_PEA_{—}1_T6 (SEQ ID NO:80). Table 31 below describes the starting and ending position of this segment on each transcript.

[2350] Segment cluster R11723_PEA_{—}1_node_{—}28 (SEQ ID NO:467) according to the present invention can be found in the following transcript(s): R11723_PEA_{—}1_T15 (SEQ ID NO:75, R11723_PEA_{—}1_T5 (SEQ ID NO:79) and R11723_PEA_{—}1_T6 (SEQ ID NO:80). Table 32 below describes the starting and ending position of this segment on each transcript.

[2351] Segment cluster R11723_PEA_{—}1_node_{—}29 (SEQ ID NO:468) according to the present invention is supported by 69 libraries. The number of libraries was determined as previously described. This segment can be found in the following transcript(s): R11723_PEA_{—}1_T15 (SEQ ID NO:75), R11723_PEA_{—}1_T5 (SEQ ID NO:79) and R11723_PEA_{—}1_T6 (SEQ ID NO 80). Table 33 below describes the starting and ending position of this segment on each transcript.

[2352] Segment cluster R11723_PEA_{—}1_node_{—}3 (SEQ ID NO:469) according to the present invention can be found in the following transcript(s): R11723_PEA_{—}1_T15 (SEQ ID NO:75) R11723_PEA_{—}1_T17 (SEQ ID NO:76), R11723_PEA_{—}1_T19 (SEQ ID NO:77) R11723_PEA_{—}1_T20 (SEQ ID NO:78), R11723_PEA_{—}1_T5 (SEQ ID NO:79) and R11723_PEA_{—}1_T6 (SEQ ID NO:80). Table 34 below describes the starting and ending position of this segment on each transcript.

[2353] Segment cluster R11723_PEA_{—}1_node_{—}30 (SEQ ID NO:470) according to the present invention can be found in the following transcript(s): R11723_PEA_{—}1_T15 (SEQ ID NO:75) R11723_PEA_{—}1_T5 (SEQ ID NO:79) and R11723_PEA_{—}1_T6 (SEQ ID NO:80). Table 35 below describes the starting and ending position of this segment on each transcript.

[2354] Segment cluster R11723_PEA_{—}1_node_{—}4 (SEQ ID NO:471) according to the present invention is supported by 25 libraries. The number of libraries was determined as previously described. This segment can be found in the following transcript(s): R11723_PEA_{—}1_T15 (SEQ ID NO:75), R11723_PEA_{—}1_T17 (SEQ ID NO:76), R11723_PEA_{—}1_T19 (SEQ ID NO:77), R11723_PEA_{—}1_T20 (SEQ ID NO:78), R11723_PEA_{—}1_T5 (SEQ ID NO:79) and R11723_PEA_{—}1_T6 (SEQ ID NO:80). Table 36 below describes the starting and ending position of this segment on each transcript.

[2355] Segment cluster R11723_PEA_{—}1_node_{—}5 (SEQ ID NO:472) according to the present invention is supported by 26 libraries. The number of libraries was determined as previously described. This segment can be found in the following transcript(s): R11723_PEA_{—}1_T15 (SEQ ID NO:75), R11723_PEA_{—}1_T17 (SEQ ID NO:76), R11723_PEA_{—}1_T19 (SEQ ID NO:77), R11723_PEA_{—}1_T20 (SEQ ID NO:78), R11723_PEA_{—}1_T5 (SEQ ID NO:79) and R11723_PEA_{—}1_T6 (SEQ ID NO:80). Table 37 below describes the starting and ending position of this segment on each transcript.

[2356] Segment cluster R11723_PEA_{—}1_node_{—}6 (SEQ ID NO:473) according to the present invention is supported by 27 libraries. The number of libraries was determined as previously described. This segment can be found in the following transcript(s): R11723_PEA_{—}1_T15 (SEQ ID NO:75), R11723_PEA_{—}1_T17 (SEQ ID NO:76), R11723_PEA_{—}1_T19 (SEQ ID NO:77), R11723_PEA_{—}1_T20 (SEQ ID NO:78), R11723_PEA_{—}1_T5 (SEQ ID NO:79) and R11723_PEA_{—}1_T6 (SEQ ID NO:80). Table 38 below describes the starting and ending position of this segment on each transcript.

[2357] Segment cluster R11723_PEA_{—}1_node_{—}7 (SEQ ID NO:474) according to the present invention is supported by 29 libraries. The number of libraries was determined as previously described. This segment can be found in the following transcript(s): R11723_PEA_{—}1_T15 (SEQ ID NO:75), R11723_PEA_{—}1_T17 (SEQ ID NO:76), R11723_PEA_{—}1_T19 (SEQ ID NO:77) R11723_PEA_{—}1_T20 (SEQ ID NO:78), R11723_PEA_{—}1_T5 (SEQ ID NO:79) and R11723_PEA_{—}1_T6 (SEQ ID NO:80). Table 39 below describes the starting and ending position of this segment on each transcript.

[2358] Segment cluster R11723_PEA_{—}1_node_{—}8 (SEQ ID NO:475) according to the present invention is supported by 2 libraries. The number of libraries was determined as previously described. This segment can be found in the following transcript(s): R11723_PEA_{—}1_T6 (SEQ ID NO:80). Table 40 below describes the starting and ending position of this segment on each transcript.

[2359] It should be noted that the variants of this cluster are variants of the hypothetical protein PSEC0181 (SEQ ID NO:1395) (referred to herein as “PSEC”). Furthermore, use of the known protein (WT protein) for detection of ovarian cancer, alone or in combination with one or more variants of this cluster and/or of any other cluster and/or of any known marker, also comprises an embodiment of the present invention.

[2360] It should be noted that the nucleotide transcript sequence of known protein (PSEC, also referred to herein as the “wild type” or WT protein) feature at least one SNP that appears to affect the coding region, in addition to certain silent SNPs. This SNP does not have an effect on the R11723_PEA_{—}1_T5 (SEQ ID NO:79) splice variant sequence): “G->” resulting in a missing nucleotide (affects amino acids from position 91 onwards). The missing nucleotide creates a frame shift, resulting in a new protein. This SNP was not previously identified and is supported by 5 ESTs out of 70 ESTs in this exon.

Expression of R11723 transcripts, which are detectable by amplicon as depicted in sequence name R11723 seg13 (SEQ ID NO:1297) in normal and cancerous colon tissues.

[2361] Expression of transcripts detectable by or according to seg13, R11723 seg13 amplicon (SEQ ID NO:1297) and R11723 seg13F (SEQ ID NO:1295) and R11723 seg13R (SEQ ID NO:1296) primers was measured by real time PCR. In parallel the expression of four housekeeping genes—PBGD (GenBank Accession No. BC019323 (SEQ ID NO:1576); amplicon—PBGD-amplicon, SEQ ID NO:531), HPRT1 (GenBank Accession No. NM_{—}000194 (SEQ ID NO:1577); amplicon—HPRT1-amplicon, SEQ ID NO:612), G6PD (GenBank Accession No. NM_{—}000402 (SEQ ID NO:1578); HPRT1-amplicon, SEQ ID NO:615), and RPS27A (GenBank Accession No. NM_{—}002954 (SEQ ID NO:1579); RPS27A amplicon, SEQ ID NO:1261), was measured similarly. For each RT sample, the expression of the above amplicon was normalized to the geometric mean of the quantities of the housekeeping genes. The normalized quantity of each RT sample was then divided by the median of the quantities of the normal post-mortem (PM) samples (Sample Nos. 41, 52, 62-67, 69-71, Table 3, above: “Tissue samples in colon cancer testing panel”), to obtain a value of fold differential expression for each sample relative to median of the normal PM samples.

[2362] FIG. 28 is a histogram showing differential expression of the above-indicated transcripts in cancerous colon samples relative to the normal samples. Values represent the average of duplicate experiments. Error bars indicate the minimal and maximal values obtained.

[2363] As is evident from FIG. 28, the expression of transcripts detectable by the above amplicon in a few cancer samples was higher by more than 5 fold than in the non-cancerous samples (Sample Nos. 41, 52, 62-67, 69-71 Table 3: “Tissue samples in colon cancer testing panel”). However, the expression of transcripts detectable by the above amplicon in a several other cancer samples was lower than in the non-cancerous samples.

[2364] Primer pairs are also optionally and preferably encompassed within the present invention; for example, for the above experiment, the following primer pair was used as a non-limiting illustrative example only of a suitable primer pair: R11723 seg13F forward primer (SEQ ID NO:1295); and R11723 seg13R reverse primer (SEQ ID NO:1296).

[2365] The present invention also preferably encompasses any amplicon obtained through the use of any suitable primer pair; for example, for the above experiment, the following amplicon was obtained as a non-limiting illustrative example only of a suitable amplicon: R11723 seg13 (SEQ ID NO:1297).

Expression of R11723 transcripts, which are detectable by amplicon as depicted in sequence name R11723junc11-18 (SEQ ID NO:1300) in normal and cancerous colon tissues.

[2366] Expression of transcripts detectable by or according to junc11-18, R11723 junc11-18 amplicon (SEQ ID NO:1300) and R11723 junc11-18F (SEQ ID NO:1298) and R11723 junc11-18R (SEQ ID NO:1299) primers was measured by real time PCR. In parallel the expression of four housekeeping genes—PBGD (GenBank Accession No. BC019323 (SEQ ID NO:1576); amplicon—PBGD-amplicon, SEQ ID NO:531), HPRT1 (GenBank Accession No. NM_{—}000194 (SEQ ID NO:1577); amplicon—HPRT1-amplicon, SEQ ID NO:612), G6PD (GenBank Accession No. NM_{—}000402 (SEQ ID NO:1578); HPRT1-amplicon, SEQ ID NO:615), and RPS27A (GenBank Accession No. NM_{—}002954 (SEQ ID NO:1579); RPS27A amplicon, SEQ ID NO:1261), was measured similarly. For each RT sample, the expression of the above amplicon was normalized to the geometric mean of the quantities of the housekeeping genes. The normalized quantity of each RT sample was then divided by the median of the quantities of the normal post-mortem (PM) samples (Sample Nos. 41, 52, 62-67, 69-71, Table 3, above: “Tissue samples in colon cancer testing panel”), to obtain a value of fold differential expression for each sample relative to median of the normal PM samples.

[2367] FIG. 29 is a histogram showing differential expression of the above-indicated transcripts in a few cancerous colon samples relative to the normal samples (Sample Nos. 41, 52, 62-67, 69-71 Table 3: “Tissue samples in colon cancer testing panel”).

[2368] As is evident from FIG. 29, the expression of transcripts detectable by the above amplicon in a few cancer samples was higher by more than 5 fold than in the non-cancerous samples (Sample Nos. 41, 52, 62-67, 69-71 Table 1: “Tissue samples in colon cancer testing panel”). However, the expression of transcripts detectable by the above amplicon in a several other cancer samples was lower than in the non-cancerous samples

[2369] Primer pairs are also optionally and preferably encompassed within the present invention; for example, for the above experiment, the following primer pair was used as a non-limiting illustrative example only of a suitable primer pair: R11723 junc11-18F forward primer (SEQ ID NO:1298); and R11723 junc11-18R reverse primer (SEQ ID NO:1299).

[2370] The present invention also preferably encompasses any amplicon obtained through the use of any suitable primer pair; for example, for the above experiment, the following amplicon was obtained as a non-limiting illustrative example only of a suitable amplicon: R11723 junc 11-18 (SEQ ID NO:1300).

Expression of R11723 transcripts, which are detectable by amplicon as depicted in sequence name R11723seg13 (SEQ ID NO:1297) in different normal tissues.

[2371] Expression of R11723 transcripts detectable by or according to R11723seg13 amplicon (SEQ ID NO:1297) and R11723seg13F (SEQ ID NO:1295), R11723seg13R (SEQ ID NO: 1296) was measured by real time PCR. In parallel the expression of four housekeeping genes-RPL19 (GenBank Accession No. NM_{—}000981 (SEQ ID NO:1580); RPL19 amplicon, SEQ ID NO:1264), TATA box (GenBank Accession No. NM_{—}003194 (SEQ ID NO:1581); TATA amplicon, SEQ ID NO:1267), UBC (GenBank Accession No. BC000449 (SEQ ID NO:1582); amplicon—Ubiquitin-amplicon, SEQ ID NO:1270) and SDHA (GenBank Accession No. NM_{—}004168 (SEQ ID NO:1583); amplicon—SDHA-amplicon, SEQ ID NO:1273) was measured similarly. For each RT sample, the expression of the above amplicon was normalized to the geometric mean of the quantities of the housekeeping genes. The normalized quantity of each RT sample was then divided by the median of the quantities of the ovary samples to obtain a value of relative expression of each sample relative to median of the ovary samples.

[2372] The results are described in FIG. 30, presenting the histogram showing the expression of R11723 transcripts, detectable by amplicon depicted in sequence name R11723seg13 (SEQ ID NO:1297) in different normal tissues.

Expression of R11723 transcripts, which are detectable by amplicon as depicted in sequence name R11723 junc11-18 (SEQ ID NO:1300) in different normal tissues.

[2373] Expression of R11723 transcripts detectable by or according to R11723seg13 amplicon (SEQ ID NO:1300) and R11723junc11-18F (SEQ ID NO:1298), R11723junc11-18R (SEQ ID NO:1299) was measured by real time PCR. In parallel the expression of four housekeeping genes—RPL19 (GenBank Accession No. NM_{—}000981 (SEQ ID NO:1580); RPL19 amplicon, SEQ ID NO:1264), TATA box (GenBank Accession No. NM_{—}003194 (SEQ ID NO:1581); TATA amplicon, SEQ ID NO:1267), UBC (GenBank Accession No. BC000449 (SEQ ID NO:1582); amplicon—Ubiquitin-amplicon, SEQ ID NO:1270) and SDHA (GenBank Accession No. NM_{—}004168 (SEQ ID NO:1583); amplicon—SDHA-amplicon, SEQ ID NO:1273) was measured similarly. For each RT sample, the expression of the above amplicon was normalized to the geometric mean of the quantities of the housekeeping genes. The normalized quantity of each RT sample was then divided by the median of the quantities of the ovary samples to obtain a value of relative expression of each sample relative to median of the ovary samples.

[2374] The results are described in FIG. 31, presenting the histogram showing the expression of R11723 transcripts, detectable by amplicon depicted in sequence name R11723 junc11-18 (SEQ ID NO:1300) in different normal tissues.

[2375] It was found that the known protein (wild type) transcript expression pattern for the above cluster (PSEC) is similar to the variant expression pattern, except that in some cases (such as ovarian cancer) the variant overexpression in cancer was found to be higher.

Variant protein alignment to the previously known protein:

Sequence name: /tmp/gp6eQTLWqk/mFtjUpUzhb:Q8IXM0

Sequence Documentation:

Alignment of: R11723_PEA_{—}1_P6 (SEQ ID NO:604)×Q8IXM0 (SEQ ID NO:1393) ••

Alignment segment 1/1:

Alignment:

Sequence name: /tmp/gp6eQTLWqk/mFtjUpUzhb:Q96AC2

Sequence Documentation:

Alignment of: R11723_PEA_{—}1_P6 (SEQ ID NO:604)×Q96AC2 (SEQ ID NO:1394) ••

Alignment segment 1/1:

Alignment:

Sequence name: /tmp/gp6eQTLWqk/mFtjUpUzhb:Q8N2G4

Sequence Documentation:

Alignment of: R11723_PEA_{—}1_P6 (SEQ ID NO:604)×Q8N2G4 (SEQ ID NO:1395) ••

Alignment segment 1/1:

Alignment:

Sequence name: /tmp/gp6eQTLWqk/mFtjUpUzhb:BAC85518 (SEQ ID NO:1396)

Sequence Documentation:

Alignment of: R11723_PEA_{—}1_P6 (SEQ ID NO:604)×BAC85518 (SEQ ID NO:1396) ••

Alignment segment 1/1:

Alignment:

Sequence name: /tmp/VXjdFlzdBX/bexTxTh0Th:Q96AC2 (SEQ ID NO:1394)

Sequence Documentation:

Alignment of: R11723_PEA_{—}1_P7 (SEQ ID NO:605)×Q96AC2 (SEQ ID NO:1394) ••

Alignment segment 1/1:

Alignment:

Sequence name: /tmp/VXjdFlzdBX/bexTxTh0Th:Q8N2G4 (SEQ ID NO:1395)

Sequence Documentation:

Alignment of: R11723_PEA_{—}1_P7 (SEQ ID NO:605)×Q8N2G4 (SEQ ID NO:1395) ••

Alignment segment 1/1:

Alignment:

Sequence name: /tmp/VXjdFlzdBX/bexTxTh0Th:BAC85273 (SEQ ID NO:1397)

Sequence Documentation:

Alignment of: R11723_PEA_{—}1_P7 (SEQ ID NO:605)×BAC85273 (SEQ ID NO:1397) ••

Alignment segment 1/1:

Alignment:

Sequence name: /tmp/VXjdFlzdBX/bexTxTh0Th:BAC85518 (SEQ ID NO:1396)

Sequence Documentation:

Alignment of: R11723_PEA_{—}1_P7 (SEQ ID NO:605)×BAC85518 (SEQ ID NO:1396) ••

Alignment segment 1/1:

Alignment:

Sequence name: /tmp/OLMSexEmIh/pc7Z7Xm1YR:Q96AC2(SEQ ID NO:1394)

Sequence Documentation:

Alignment of: R11723_PEA_{—}1_P10 (SEQ ID NO:607)×Q96AC2 (SEQ ID NO:1394) ••

Alignment segment 1/1:

Alignment:

Sequence name: /tmp/OLMSexEmIh/pc7Z7Xm1YR:Q8N2G4 (SEQ ID NO:1395)

Sequence Documentation:

Alignment of: R11723_PEA_{—}1_P10 (SEQ ID NO:607)×Q8N2G4 (SEQ ID NO:1395) ••

Alignment segment 1/1:

Alignment:

Sequence name: /tmp/OLMSexEmIh/pc7Z7Xm1YR:BAC85273 (SEQ ID NO:1397)

Sequence Documentation:

Alignment of: R11723_PEA_{—}1_P10 (SEQ ID NO:607)×BAC85273 (SEQ ID NO:1397) ••

Alignment segment 1/1:

Alignment:

Sequence name: /tmp/OLMSexEmIh/pc7Z7Xm1YR:BAC85518 (SEQ ID NO:1396)

Sequence Documentation:

Alignment of: R11723_PEA_{—}1_P10 (SEQ ID NO:607)×BAC85518 (SEQ ID NO:1396) ••

Alignment segment 1/1:

Alignment:

Alignment of: R11723_PEA_{—}1_P13 (SEQ ID NO:606)×Q96AC2 (SEQ ID NO:1394) ••

Alignment segment 1/1:

Alignment:

Description for Cluster M77903

[2376] Cluster M77903 features 4 transcript(s) and 29 segment(s) of interest, the names for which are given in Tables 1 and 2, respectively, the sequences themselves are given at the end of the application. The selected protein variants are given in table 3.

[2377] These sequences are variants of the known protein Translocon-associated protein, alpha subunit precursor (SwissProt accession identifier SSRA_HUMAN; known also according to the synonyms TRAP-alpha; Signal sequence receptor alpha subunit; SSR-alpha), SEQ ID NO: 641, referred to herein as the previously known protein.

[2378] Protein Translocon-associated protein (SEQ ID NO:641), alpha subunit precursor is known or believed to have the following function(s): TRAP proteins are part of a complex whose function is to bind calcium to the ER membrane and thereby regulate the retention of ER resident proteins. May be involved in the recycling of the translocation apparatus after completion of the translocation process or may function as a membrane-bound chaperone facilitating folding of translocated proteins. The sequence for protein Translocon-associated protein, alpha subunit precursor is given at the end of the application, as “Translocon-associated protein, alpha subunit precursor amino acid sequence”. Known polymorphisms for this sequence are as shown in Table 4.

[2379] Protein Translocon-associated protein (SEQ ID NO:641), alpha subunit precursor localization is believed to be Type I membrane protein. Endoplasmic reticulum.

[2380] The following GO Annotation(s) apply to the previously known protein. The following annotation(s) were found: co-translational membrane targeting; positive control of cell proliferation, which are annotation(s) related to Biological Process; signal sequence receptor; calcium binding, which are annotation(s) related to Molecular Function; and endoplasmic reticulum; integral membrane protein, which are annotation(s) related to Cellular Component.

[2381] The GO assignment relies on information from one or more of the SwissProt/TremB1 Protein knowledgebase, available from <http://www.expasy.ch/sprot/>; or Locuslink, available from <http://www.ncbi.nlm.nih.gov/projects/LocusLink/>.

[2382] Cluster M77903 can be used as a diagnostic marker according to overexpression of transcripts of this cluster in cancer. Expression of such transcripts in normal tissues is also given according to the previously described methods. The term “number” in the left hand column of the table and the numbers on the y-axis of the figure below refer to weighted expression of ESTs in each category, as “parts per million” (ratio of the expression of ESTs for a particular cluster to the expression of all ESTs in that category, according to parts per million).

[2383] Overall, the following results were obtained as shown with regard to the histograms in FIG. 33 and Table 5. This cluster is overexpressed (at least at a minimum level) in the following pathological conditions: ovarian carcinoma and uterine malignancies.

[2384] As noted above, cluster M77903 features 4 transcript(s), which were listed in Table 1 above. These transcript(s) encode for protein(s) which are variant(s) of protein Translocon-associated protein (SEQ ID NO:641), alpha subunit precursor. A description of each variant protein according to the present invention is now provided.

[2385] Variant protein M77903_P4 (SEQ ID NO:608) according to the present invention has an amino acid sequence as given at the end of the application; it is encoded by transcript(s) M77903_T11 (SEQ ID NO:81). An alignment is given to the known protein (Translocon-associated protein (SEQ ID NO:641), alpha subunit precursor) at the end of the application. One or more alignments to one or more previously published protein sequences are given at the end of the application. A brief description of the relationship of the variant protein according to the present invention to each such aligned protein is as follows:

[2386] Comparison report between M77903_P4 (SEQ ID NO:608) and SSRA_HUMAN (SEQ ID NO:641):

[2387] 1. An isolated chimeric polypeptide encoding for M77903_P4 (SEQ ID NO:608) comprising a first amino acid sequence being at least 90% homologous to MRLLPRLLLLLLLVFPATVLFRGGPRGLLAVAQDLTEDEETVEDSIIEDEDDEAEVEEDE PTDLVEDKEEEDVSGEPEASPSADTTILFVKGEDFPANNIVKFLVGFTNKGTEDFIVESLD ASFRYPQDYQFYIQNFTALPLNTVVPPQRQATFEYSFIPAEPMGGRPFGLVINLNYKDLN GNVFQDAVFNQTVTVIEREDGLDGET corresponding to amino acids 1-207 of SSRA_HUMAN (SEQ ID NO:641), which also corresponds to amino acids 1-207 of M77903_P4 (SEQ ID NO:608), and a second amino acid sequence being at least 70%, optionally at least 80%, preferably at least 85%, more preferably at least 90% and most preferably at least 95% homologous to a polypeptide having the sequence VRDPYRK (SEQ ID NO:1565) corresponding to amino acids 208-214 of M77903_P4 (SEQ ID NO:608), wherein said first amino acid sequence and second amino acid sequence are contiguous and in a sequential order.

[2388] 2. An isolated polypeptide encoding for a tail of M77903_P4 (SEQ ID NO:608) comprising a polypeptide being at least 70%, optionally at least about 80%, preferably at least about 85%, more preferably at least about 90% and most preferably at least about 95% homologous to the sequence VRDPYRK (SEQ ID NO:1565) in M77903_P4 (SEQ ID NO:608)

[2389] The location of the variant protein was determined according to results from a number of different software programs and analyses, including analyses from SignalP and other specialized programs. The variant protein is believed to be located as follows with regard to the cell: secreted. The protein localization is believed to be secreted because both signal-peptide prediction programs predict that this protein has a signal peptide, and neither trans-membrane region prediction program predicts that this protein has a trans-membrane region.

[2390] Variant protein M77903_P4 (SEQ ID NO:608) also has the following non-silent SNPs (Single Nucleotide Polymorphisms) as listed in Table 7, (given according to their position(s) on the amino acid sequence, with the alternative amino acid(s) listed; the last column indicates whether the SNP is known or not; the presence of known SNPs in variant protein M77903_P4 (SEQ ID NO:608) sequence provides support for the deduced sequence of this variant protein according to the present invention).

[2391] The glycosylation sites of variant protein M77903_P4 (SEQ ID NO:608), as compared to the known protein Translocon-associated protein (SEQ ID NO:641), alpha subunit precursor, are described in Table 8 (given according to their position(s) on the amino acid sequence in the first column; the second column indicates whether the glycosylation site is present in the variant protein; and the last column indicates whether the position is different on the variant protein).

[2392] Variant protein M77903_P4 (SEQ ID NO:608) is encoded by the following transcript(s): M77903_T11 (SEQ ID NO:81), for which the sequence(s) is/are given at the end of the application. The coding portion of transcript M77903_T11 (SEQ ID NO:81) is shown in bold; this coding portion starts at position 200 and ends at position 841. The transcript also has the following SNPs as listed in Table 9 (given according to their position on the nucleotide sequence, with the alternative nucleic acid listed; the last column indicates whether the SNP is known or not; the presence of known SNPs in variant protein M77903_P4 (SEQ ID NO:608) sequence provides support for the deduced sequence of this variant protein according to the present invention).

[2393] Variant protein M77903_P5 (SEQ ID NO:609) according to the present invention has an amino acid sequence as given at the end of the application; it is encoded by transcript(s) M77903_T12 (SEQ ID NO:82). An alignment is given to the known protein (Translocon-associated protein (SEQ ID NO:641), alpha subunit precursor) at the end of the application. One or more alignments to one or more previously published protein sequences are given at the end of the application. A brief description of the relationship of the variant protein according to the present invention to each such aligned protein is as follows:

[2394] Comparison report between M77903_P5 (SEQ ID NO:609) and SSRA_HUMAN (SEQ ID NO:641):

[2395] 1. An isolated chimeric polypeptide encoding for M77903_P5 (SEQ ID NO:609) comprising a first amino acid sequence being at least 90% homologous to MRLLPRLLLLLLLVFPATVLFRGGPRGLLAVAQDLTEDEETVEDSIIEDEDDEAEVEEDE PTDLVEDKEEEDVSGEPEASPSADTTILFVKGEDFPANNIVKFLVGFTNKGTEDFIVESLD ASFRYPQDYQFYIQNFTALPLNTVVPPQRQATFEYSFIPAEPMGGRPFGLVINLNYKDLN GNVFQDAVFNQTVTVIEREDGLDGET corresponding to amino acids 1-207 of SSRA_HUMAN (SEQ ID NO:641), which also corresponds to amino acids 1-207 of M77903_P5 (SEQ ID NO:609).

[2396] The location of the variant protein was determined according to results from a number of different software programs and analyses, including analyses from SignalP and other specialized programs. The variant protein is believed to be located as follows with regard to the cell: secreted. The protein localization is believed to be secreted because both signal-peptide prediction programs predict that this protein has a signal peptide, and neither trans-membrane region prediction program predicts that this protein has a trans-membrane region.

[2397] Variant protein M77903_P5 (SEQ ID NO:609) also has the following non-silent SNPs (Single Nucleotide Polymorphisms) as listed in Table 10, (given according to their position(s) on the amino acid sequence, with the alternative amino acid(s) listed; the last column indicates whether the SNP is known or not; the presence of known SNPs in variant protein M77903_P5 (SEQ ID NO:609) sequence provides support for the deduced sequence of this variant protein according to the present invention).

[2398] The glycosylation sites of variant protein M77903_P5 (SEQ ID NO:609), as compared to the known protein Translocon-associated protein (SEQ ID NO:641), alpha subunit precursor, are described in Table 11 (given according to their position(s) on the amino acid sequence in the first column; the second column indicates whether the glycosylation site is present in the variant protein; and the last column indicates whether the position is different on the variant protein).

[2399] Variant protein M77903_P5 (SEQ ID NO:609) is encoded by the following transcript(s): M77903_T12 (SEQ ID NO:82), for which the sequence(s) is/are given at the end of the application. The coding portion of transcript M77903_T12 (SEQ ID NO:82) is shown in bold; this coding portion starts at position 200 and ends at position 820. The transcript also has the following SNPs as listed in Table 12 (given according to their position on the nucleotide sequence, with the alternative nucleic acid listed; the last column indicates whether the SNP is known or not; the presence of known SNPs in variant protein M77903_P5 (SEQ ID NO:609) sequence provides support for the deduced sequence of this variant protein according to the present invention).

[2400] Variant protein M77903_P15 (SEQ ID NO:610) according to the present invention has an amino acid sequence as given at the end of the application; it is encoded by transcript(s) M77903_T34 (SEQ ID NO:83). An alignment is given to the known protein (Translocon-associated protein (SEQ ID NO:641), alpha subunit precursor) at the end of the application. One or more alignments to one or more previously published protein sequences are given at the end of the application. A brief description of the relationship of the variant protein according to the present invention to each such aligned protein is as follows:

[2401] Comparison report between M77903_P15 (SEQ ID NO:610) and SSRA_HUMAN (SEQ ID NO:641):

[2402] 1. An isolated chimeric polypeptide encoding for M77903_P15 (SEQ ID NO:610) comprising a first amino acid sequence being at least 90% homologous to MRLLPRLLLLLLLVFPATVLFRGGPRGLLAVAQDLTEDEETVEDSIIEDEDDEAEVEEDE PTDLVEDKEEEDVSGEPEASPSADTTILFVKGEDFPANNIVKFLVGFTNKGTEDFIVESLD ASFRYPQDYQFYIQNFTALPLNTVVPPQRQATFEYSFIPAEPMGGRPFGLVINLNYKDLN corresponding to amino acids 1-181 of SSRA_HUMAN (SEQ ID NO:641), which also corresponds to amino acids 1-181 of M77903_P15 (SEQ ID NO:610), and a second amino acid sequence being at least 70%, optionally at least 80%, preferably at least 85%, more preferably at least 90% and most preferably at least 95% homologous to a polypeptide having the sequence VRSSKPSFCLS (SEQ ID NO:1566) corresponding to amino acids 182-192 of M77903_P15 (SEQ ID NO:610), wherein said first amino acid sequence and second amino acid sequence are contiguous and in a sequential order.

[2403] 2. An isolated polypeptide encoding for a tail of M77903_P15 (SEQ ID NO:610) comprising a polypeptide being at least 70%, optionally at least about 80%, preferably at least about 85%, more preferably at least about 90% and most preferably at least about 95% homologous to the sequence VRSSKPSFCLS (SEQ ID NO:1566) in M77903_P15 (SEQ ID NO:610).

[2404] The location of the variant protein was determined according to results from a number of different software programs and analyses, including analyses from SignalP and other specialized programs. The variant protein is believed to be located as follows with regard to the cell: secreted. The protein localization is believed to be secreted because both signal-peptide prediction programs predict that this protein has a signal peptide, and neither trans-membrane region prediction program predicts that this protein has a trans-membrane region.

[2405] Variant protein M77903_P15 (SEQ ID NO:610) also has the following non-silent SNPs (Single Nucleotide Polymorphisms) as listed in Table 13, (given according to their position(s) on the amino acid sequence, with the alternative amino acid(s) listed; the last column indicates whether the SNP is known or not; the presence of known SNPs in variant protein M77903_P15 (SEQ ID NO:610) sequence provides support for the deduced sequence of this variant protein according to the present invention).

[2406] The glycosylation sites of variant protein M77903_P15 (SEQ ID NO:610), as compared to the known protein Translocon-associated protein (SEQ ID NO:641), alpha subunit precursor, are described in Table 14 (given according to their position(s) on the amino acid sequence in the first column; the second column indicates whether the glycosylation site is present in the variant protein; and the last column indicates whether the position is different on the variant protein).

[2407] Variant protein M77903_P15 (SEQ ID NO:610) is encoded by the following transcript(s): M77903_T34 (SEQ ID NO:83), for which the sequence(s) is/are given at the end of the application. The coding portion of transcript M77903_T34 (SEQ ID NO:83) is shown in bold; this coding portion starts at position 200 and ends at position 775. The transcript also has the following SNPs as listed in Table 15 (given according to their position on the nucleotide sequence, with the alternative nucleic acid listed; the last column indicates whether the SNP is known or not; the presence of known SNPs in variant protein M77903_P15 (SEQ ID NO:610) sequence provides support for the deduced sequence of this variant protein according to the present invention).

[2408] Variant protein M77903_P16 (SEQ ID NO:611) according to the present invention has an amino acid sequence as given at the end of the application; it is encoded by transcript(s) M77903_T36 (SEQ ID NO:84). An alignment is given to the known protein (Translocon-associated protein (SEQ ID NO:641), alpha subunit precursor) at the end of the application. One or more alignments to one or more previously published protein sequences are given at the end of the application. A brief description of the relationship of the variant protein according to the present invention to each such aligned protein is as follows:

[2409] Comparison report between M77903_P16 (SEQ ID NO:611) and SSRA_HUMAN (SEQ ID NO:641):

[2410] 1. An isolated chimeric polypeptide encoding for M77903_P16 (SEQ ID NO:611) comprising a first amino acid sequence being at least 90% homologous to MRLLPRLLLLLLLVFPATVLFRGGPRGLLAVAQDLTEDEETVEDSIIEDEDDEAEVEEDE PTDLVEDKEEEDVSGEPEASPSADTTILFVKGE corresponding to amino acids 1-93 of SSRA_HUMAN (SEQ ID NO:641), which also corresponds to amino acids 1-93 of M77903_P16 (SEQ ID NO:611), and a second amino acid sequence being at least 70%, optionally at least 80%, preferably at least 85%, more preferably at least 90% and most preferably at least 95% homologous to a polypeptide having the sequence GNTEVLVLIQM (SEQ ID NO:1567) corresponding to amino acids 94-104 of M77903_P16 (SEQ ID NO:611), wherein said first amino acid sequence and second amino acid sequence are contiguous and in a sequential order.

[2411] 2. An isolated polypeptide encoding for a tail of M77903_P16 (SEQ ID NO:611) comprising a polypeptide being at least 70%, optionally at least about 80%, preferably at least about 85%, more preferably at least about 90% and most preferably at least about 95% homologous to the sequence GNTEVLVLIQM (SEQ ID NO:1567) in M77903_P16 (SEQ ID NO:611).

[2412] The location of the variant protein was determined according to results from a number of different software programs and analyses, including analyses from SignalP and other specialized programs. The variant protein is believed to be located as follows with regard to the cell: secreted. The protein localization is believed to be secreted because both signal-peptide prediction programs predict that this protein has a signal peptide, and neither trans-membrane region prediction program predicts that this protein has a trans-membrane region.

[2413] Variant protein M77903_P16 (SEQ ID NO:611) also has the following non-silent SNPs (Single Nucleotide Polymorphisms) as listed in Table 16, (given according to their position(s) on the amino acid sequence, with the alternative amino acid(s) listed; the last column indicates whether the SNP is known or not; the presence of known SNPs in variant protein M77903_P16 (SEQ ID NO:611) sequence provides support for the deduced sequence of this variant protein according to the present invention).

[2414] The glycosylation sites of variant protein M77903_P16 (SEQ ID NO:611), as compared to the known protein Translocon-associated protein (SEQ ID NO:641), alpha subunit precursor, are described in Table 17 (given according to their position(s) on the amino acid sequence in the first column; the second column indicates whether the glycosylation site is present in the variant protein; and the last column indicates whether the position is different on the variant protein).

[2415] Variant protein M77903_P16 (SEQ ID NO:611) is encoded by the following transcript(s): M77903_T36 (SEQ ID NO:84, for which the sequence(s) is/are given at the end of the application. The coding portion of transcript M77903_T36 (SEQ ID NO:84) is shown in bold; this coding portion starts at position 200 and ends at position 511. The transcript also has the following SNPs as listed in Table 18 (given according to their position on the nucleotide sequence, with the alternative nucleic acid listed; the last column indicates whether the SNP is known or not; the presence of known SNPs in variant protein M77903_P16 (SEQ ID NO:611) sequence provides support for the deduced sequence of this variant protein according to the present invention).

[2416] As noted above, cluster M77903 features 29 segment(s), which were listed in Table 2 above and for which the sequence(s) are given at the end of the application. These segment(s) are portions of nucleic acid sequence(s) which are described herein separately because they are of particular interest. A description of each segment according to the present invention is now provided.

[2417] Segment cluster M77903_node_{—}2 (SEQ ID NO:476) according to the present invention is supported by 150 libraries. The number of libraries was determined as previously described. This segment can be found in the following transcript(s): M77903_T11 (SEQ ID NO:81), M77903_T12 (SEQ ID NO:82), M77903_T34 (SEQ ID NO:83) and M77903_T36 (SEQ ID NO:84). Table 19 below describes the starting and ending position of this segment on each transcript.

[2418] Segment cluster M77903_node_{—}13 (SEQ ID NO:477) according to the present invention is supported by 1 libraries. The number of libraries was determined as previously described. This segment can be found in the following transcript(s): M77903_T36 (SEQ ID NO:84). Table 20 below describes the starting and ending position of this segment on each transcript.

[2419] Segment cluster M77903_node_{—}16 (SEQ ID NO:478) according to the present invention is supported by 149 libraries. The number of libraries was determined as previously described. This segment can be found in the following transcript(s): M77903_T11 (SEQ ID NO:81), M77903_T12 (SEQ ID NO:82) and M77903_T34 (SEQ ID NO:83). Table 21 below describes the starting and ending position of this segment on each transcript.

[2420] Segment cluster M77903_node_{—}18 (SEQ ID NO:479) according to the present invention is supported by 2 libraries. The number of libraries was determined as previously described. This segment can be found in the following transcript(s): M77903_T34 (SEQ ID NO:83). Table 22 below describes the starting and ending position of this segment on each transcript.

[2421] Segment cluster M77903_node_{—}35 (SEQ ID NO:480) according to the present invention is supported by 145 libraries. The number of libraries was determined as previously described. This segment can be found in the following transcript(s): M77903_T11 (SEQ ID NO:81) and M77903_T12 (SEQ ID NO:82). Table 23 below describes the starting and ending position of this segment on each transcript.

[2422] Segment cluster M77903_node_{—}36 (SEQ ID NO:481) according to the present invention is supported by 173 libraries. The number of libraries was determined as previously described. This segment can be found in the following transcript(s): M77903_T11 (SEQ ID NO:81) and M77903_T12 (SEQ ID NO:82). Table 24 below describes the starting and ending position of this segment on each transcript.

[2423] Segment cluster M77903_node_{—}37 (SEQ ID NO:482) according to the present invention is supported by 128 libraries. The number of libraries was determined as previously described. This segment can be found in the following transcript(s): M77903_T11 (SEQ ID NO:81) and M77903_T12 (SEQ ID NO:82). Table 25 below describes the starting and ending position of this segment on each transcript.

[2424] Segment cluster M77903_node_{—}38 (SEQ ID NO:483) according to the present invention is supported by 152 libraries. The number of libraries was determined as previously described. This segment can be found in the following transcript(s): M77903_T11 (SEQ ID NO:81) and M77903_T12 (SEQ ID NO:82). Table 26 below describes the starting and ending position of this segment on each transcript.

[2425] Segment cluster M77903_node_{—}40 (SEQ ID NO:484) according to the present invention is supported by 186 libraries. The number of libraries was determined as previously described. This segment can be found in the following transcript(s): M77903_T11 (SEQ ID NO:81) and M77903_T12 (SEQ ID NO:82). Table 27 below describes the starting and ending position of this segment on each transcript.

[2426] Segment cluster M77903_node_{—}44 (SEQ ID NO:485) according to the present invention is supported by 122 libraries. The number of libraries was determined as previously described. This segment can be found in the following transcript(s): M77903_T11 (SEQ ID NO:81) and M77903_T12 (SEQ ID NO:82). Table 28 below describes the starting and ending position of this segment on each transcript.

[2427] Segment cluster M77903_node_{—}46 (SEQ ID NO:486) according to the present invention is supported by 10 libraries. The number of libraries was determined as previously described. This segment can be found in the following transcript(s): M77903_T11 (SEQ ID NO:81) and M77903_T12 (SEQ ID NO:82). Table 29 below describes the starting and ending position of this segment on each transcript.

[2428] Segment cluster M77903_node_{—}47 (SEQ ID NO:487) according to the present invention is supported by 40 libraries. The number of libraries was determined as previously described. This segment can be found in the following transcript(s): M77903_T11 (SEQ ID NO:81) and M77903_T12 (SEQ ID NO:82). Table 30 below describes the starting and ending position of this segment on each transcript.

[2429] Segment cluster M77903_node_{—}48 (SEQ ID NO:488) according to the present invention is supported by 63 libraries. The number of libraries was determined as previously described. This segment can be found in the following transcript(s): M77903_T11 (SEQ ID NO:81) and M77903_T12 (SEQ ID NO:82). Table 31 below describes the starting and ending position of this segment on each transcript.

[2430] Segment cluster M77903_node_{—}49 (SEQ ID NO:489) according to the present invention is supported by 7 libraries. The number of libraries was determined as previously described. This segment can be found in the following transcript(s): M77903_T11 (SEQ ID NO:81) and M77903_T12 (SEQ ID NO:82). Table 32 below describes the starting and ending position of this segment on each transcript.

[2431] Segment cluster M77903_node_{—}51 (SEQ ID NO:490) according to the present invention is supported by 14 libraries. The number of libraries was determined as previously described. This segment can be found in the following transcript(s): M77903_T11 (SEQ ID NO:81) and M77903_T12 (SEQ ID NO:82). Table 33 below describes the starting and ending position of this segment on each transcript.

[2432] Segment cluster M77903_node_{—}52 (SEQ ID NO:491) according to the present invention is supported by 160 libraries. The number of libraries was determined as previously described. This segment can be found in the following transcript(s): M77903_T11 (SEQ ID NO:81) and M77903_T12 (SEQ ID NO:82). Table 34 below describes the starting and ending position of this segment on each transcript.

[2433] According to an optional embodiment of the present invention, short segments related to the above cluster are also provided. These segments are up to about 120 bp in length, and so are included in a separate description.

[2434] Segment cluster M77903_node_{—}1 (SEQ ID NO:492) according to the present invention is supported by 4 libraries. The number of libraries was determined as previously described. This segment can be found in the following transcript(s): M77903_T11 (SEQ ID NO:81), M77903_T12 (SEQ ID NO:82, M77903_T34 (SEQ ID NO:83) and M77903_T36 (SEQ ID NO:84). Table 35 below describes the starting and ending position of this segment on each transcript.

[2435] Segment cluster M77903_node_{—}5 (SEQ ID NO:493) according to the present invention is supported by 154 libraries. The number of libraries was determined as previously described. This segment can be found in the following transcript(s): M77903_T11 (SEQ ID NO:81), M77903_T12 (SEQ ID NO:82), M77903_T34 (SEQ ID NO:83) and M77903_T36 (SEQ ID NO:84). Table 36 below describes the starting and ending position of this segment on each transcript.

[2436] Segment cluster M77903_node_{—}9 (SEQ ID NO:494) according to the present invention can be found in the following transcript(s): M77903_T11 (SEQ ID NO:81), M77903_T12 (SEQ ID NO:82), M77903_T34 (SEQ ID NO:83) and M77903_T36 (SEQ ID NO:84). Table 37 below describes the starting and ending position of this segment on each transcript.

[2437] Segment cluster M77903_node_{—}10 (SEQ ID NO:495) according to the present invention is supported by 148 libraries. The number of libraries was determined as previously described. This segment can be found in the following transcript(s): M77903_T11 (SEQ ID NO:81), M77903_T12 (SEQ ID NO:82), M77903_T34 (SEQ ID NO:83) and M77903_T36 (SEQ ID NO:84). Table 38 below describes the starting and ending position of this segment on each transcript.

[2438] Segment cluster M77903_node_{—}11 (SEQ ID NO:496) according to the present invention can be found in the following transcript(s): M77903_T11 (SEQ ID NO:81), M77903_T12 (SEQ ID NO:82), M77903_T34 (SEQ ID NO:83) and M77903_T36 (SEQ ID NO:84). Table 39 below describes the starting and ending position of this segment on each transcript.

[2439] Segment cluster M77903_node_{—}12 (SEQ ID NO:497) according to the present invention can be found in the following transcript(s): M77903_T11 (SEQ ID NO:81), M77903_T12 (SEQ ID NO:82), M77903_T34 (SEQ ID NO:83) and M77903_T36 (SEQ ID NO:84). Table 40 below describes the starting and ending position of this segment on each transcript.

[2440] Segment cluster M77903_node_{—}15 (SEQ ID NO:498) according to the present invention is supported by 129 libraries. The number of libraries was determined as previously described. This segment can be found in the following transcript(s): M77903_T11 (SEQ ID NO:81), M77903_T12 (SEQ ID NO:82) and M77903_T34 (SEQ ID NO:83). Table 41 below describes the starting and ending position of this segment on each transcript.

[2441] Segment cluster M77903_node_{—}17 (SEQ ID NO:499) according to the present invention is supported by 141 libraries. The number of libraries was determined as previously described. This segment can be found in the following transcript(s): M77903_T11 (SEQ ID NO:81), M77903_T12 (SEQ ID NO:82) and M77903_T34 (SEQ ID NO:83). Table 42 below describes the starting and ending position of this segment on each transcript.

[2442] Segment cluster M77903_node_{—}20 (SEQ ID NO:500) according to the present invention is supported by 134 libraries. The number of libraries was determined as previously described. This segment can be found in the following transcript(s): M77903_T11 (SEQ ID NO:81) and M77903_T12 (SEQ ID NO:82). Table 43 below describes the starting and ending position of this segment on each transcript.

[2443] Segment cluster M77903_node_{—}28 (SEQ ID NO:501) according to the present invention is supported by 134 libraries. The number of libraries was determined as previously described. This segment can be found in the following transcript(s): M77903_T11 (SEQ ID NO:81). Table 44 below describes the starting and ending position of this segment on each transcript.

[2444] Segment cluster M77903_node_{—}34 (SEQ ID NO:502) according to the present invention is supported by 134 libraries. The number of libraries was determined as previously described. This segment can be found in the following transcript(s): M77903_T11 (SEQ ID NO:81) and M77903_T12 (SEQ ID NO:82). Table 45 below describes the starting and ending position of this segment on each transcript.

[2445] Segment cluster M77903_node_{—}41 (SEQ ID NO:503) according to the present invention is supported by 119 libraries. The number of libraries was determined as previously described. This segment can be found in the following transcript(s): M77903_T11 (SEQ ID NO:81) and M77903_T12 (SEQ ID NO:82). Table 46 below describes the starting and ending position of this segment on each transcript.

[2446] Segment cluster M77903_node_{—}42 (SEQ ID NO:504) according to the present invention is supported by 123 libraries. The number of libraries was determined as previously described. This segment can be found in the following transcript(s): M77903_T11 (SEQ ID NO:81) and M77903_T12 (SEQ ID NO:82). Table 47 below describes the starting and ending position of this segment on each transcript.

Variant protein alignment to the previously known protein:

Sequence name: SSRA_HUMAN (SEQ ID NO:641)

Sequence Documentation:

Alignment of: M77903_P4 (SEQ ID NO:608)×SSRA_HUMAN (SEQ ID NO:641) ••

Alignment segment 1/1:

Alignment:

Sequence name: SSRA_HUMAN (SEQ ID NO:641)

Sequence Documentation:

Alignment of: M77903_P5 (SEQ ID NO:609)×SSRA_HUMAN (SEQ ID NO:641) ••

Alignment segment 1/1:

Alignment:

Sequence name: SSRA_HUMAN (SEQ ID NO:641)

Sequence Documentation:

Alignment of: M77903_P15 (SEQ ID NO:610)×SSRA_HUMAN (SEQ ID NO:641) ••

Alignment segment 1/1:

Alignment:

Sequence name: SSRA_HUMAN (SEQ ID NO:641)

Sequence Documentation:

Alignment of: M77903_P16 (SEQ ID NO:611)×SSRA_HUMAN (SEQ ID NO:641) ••

Alignment segment 1/1:

Alignment:

[2447] Expression of SSRA_HUMAN. SSR-alpha M77903 transcripts, which are detectable by amplicon, as depicted in sequence name M77903seg18 (SEQ ID NO:1303) in normal and cancerous colon tissues.

[2448] Transcripts detectable by or according to M77903seg18 amplicon (SEQ ID NO:1303) and M77903seg18F (SEQ ID NO:1301) and M77903seg18R (SEQ ID NO:1302) primers were measured by real time PCR. In parallel the expression of four housekeeping genes: PBGD (GenBank Accession No. BC019323 (SEQ ID NO:1576); amplicon—PBGD-amplicon, SEQ ID NO:531), HPRT1 (GenBank Accession No. NM_{—}000194 (SEQ ID NO:1577); amplicon—HPRT1-amplicon, SEQ ID NO:612), and, G6PD (GenBank Accession No. NM_{—}000402 (SEQ ID NO:1578); HPRT1-amplicon, SEQ ID NO:615), and RPS27A (GenBank Accession No. NM_{—}002954 (SEQ ID NO:1579); RPS27A amplicon, SEQ ID NO:1261), was measured similarly. For each RT sample, the expression of the above amplicon was normalized to the geometric mean of the quantities of the housekeeping genes. The normalized quantity of each RT sample was then divided by the median of the quantities of the normal post-mortem (PM) samples (Sample Nos. 41, 52, 62-67, 69-71, Table 1 Tissue samples in testing panel), to obtain a value of fold up-regulation for each sample relative to median of the normal PM samples.

[2449] FIG. 34 is a histogram showing over expression of the above-indicated SSRA_HUMAN: SSR-alpha transcripts in cancerous colon samples relative to the normal samples.

[2450] As is evident from FIG. 34, the expression of SSRA_HUMAN: SSR-alpha transcripts detectable by the above amplicon(s) in a few cancer samples was higher than in the non-cancerous samples (Sample Nos. 41,52,62-67, 69-71 Table 1 Tissue samples in testing panel). Notably an over-expression of at least 5 fold was found in 5 out of 37 adenocarcinoma samples.

[2451] Primer pairs are also optionally and preferably encompassed within the present invention; for example, for the above experiment, the following primer pair was used as a non-limiting illustrative example only of a suitable primer pair: M77903seg18F forward primer (SEQ ID NO:1301); and M77903seg18R reverse primer (SEQ ID NO:1302).

[2452] The present invention also preferably encompasses any amplicon obtained through the use of any suitable primer pair; for example, for the above experiment, the following amplicon was obtained as a non-limiting illustrative example only of a suitable amplicon: M77903seg18] (SEQ ID NO:1303).

As can be seen from FIGS. 35 and 36, for cluster M77903, amplicon name: M77903 junc20-34-35, and M77903 junc20-28, respectively, low over expression was observed in one experiment carried out with colon.

[2453] Expression of SSRA_HUMAN: Translocon-associated protein, alpha subunit (TRAP-alpha Signal sequence receptor alpha subunitSSR-alpha) M77903 transcripts which are detectable by amplicon as depicted in sequence name M77903junc20-28 (SEQ ID NO:1306) in normal and cancerous colon tissues

[2454] Expression of SSRA_HUMAN: Translocon-associated protein, alpha subunit (TRAP-alpha Signal sequence receptor alpha subunitSSR-alpha) transcripts detectable by or according to junc20-28, M77903junc20-28 amplicon (SEQ ID NO:1306) and primers M77903junc20-28F (SEQ ID NO:1304) and M77903junc20-28R (SEQ ID NO:1305) was measured by real time PCR. In parallel the expression of four housekeeping genes—PBGD (GenBank Accession No. BC019323 (SEQ ID NO:1576); amplicon—PBGD-amplicon, SEQ ID NO:531), HPRT1 (GenBank Accession No. NM_{—}000194 (SEQ ID NO:1577); amplicon—HPRT1-amplicon, SEQ ID NO:612), G6PD (GenBank Accession No. NM_{—}000402 (SEQ ID NO:1578); HPRT1-amplicon, SEQ ID NO:615), RPS27A (GenBank Accession No. NM_{—}002954 (SEQ ID NO:1579); RPS27A amplicon, SEQ ID NO:1261) was measured similarly. For each RT sample, the expression of the above amplicon was normalized to the geometric mean of the quantities of the housekeeping genes. The normalized quantity of each RT sample was then divided by the median of the quantities of the normal post-mortem (PM) samples (Sample Nos. 41, 52, 62-67, 69-71, Table 1, above, “Tissue samples in testing panel”), to obtain a value of fold up-regulation for each sample relative to median of the normal PM samples.

[2455] FIG. 35 is a histogram showing over expression of the above-indicated SSRA_HUMAN: Translocon-associated protein, alpha subunit TRAP-alpha Signal sequence receptor alpha subunitSSR-alpha transcripts in cancerous colon samples relative to the normal samples. As is evident from FIG. 35, the expression of the above-indicated SSRA_HUMAN: Translocon-associated protein, alpha subunit TRAP-alpha Signal sequence receptor alpha subunitSSR-alpha transcripts detectable by the above amplicon in cancer samples was higher in a few samples than in the non-cancerous samples (Sample Nos. 41, 52, 62-67, 69-71, Table 1, above, “Tissue samples in testing panel”). Notably an over-expression of at least 5 fold was found in 4 out of 36 adenocarcinoma samples.

[2456] Primer pairs are also optionally and preferably encompassed within the present invention; for example, for the above experiment, the following primer pair was used as a non-limiting illustrative example only of a suitable primer pair: M77903junc20-28F forward primer (SEQ ID NO:1304); and M77903junc20-28R reverse primer (SEQ ID NO:1305).

[2457] The present invention also preferably encompasses any amplicon obtained through the use of any suitable primer pair; for example, for the above experiment, the following amplicon was obtained as a non-limiting illustrative example only of a suitable amplicon: M77903junc20-28 (SEQ ID NO:1306).

[2458] Primers:

[2459] Forward primer M77903junc20-28F (SEQ ID NO:1304):

[2460] Expression of SSRA_HUMAN: Translocon-associated protein, alpha subunit TRAP-alpha Signal sequence receptor alpha subunitSSR-alphaM77903 transcripts which are detectable by amplicon as depicted in sequence name M77903junc20-34-35 (SEQ ID NO:1309) in normal and cancerous colon tissues

[2461] Expression of SSRA_HUMAN: Translocon-associated protein, alpha subunit TRAP-alpha Signal sequence receptor alpha subunitSSR-alpha transcripts detectable by or according to junc20-34-35, M77903junc20-34-35 amplicon (SEQ ID NO:1309) and primers M77903junc20-34-35F (SEQ ID NO:1307) and M77903junc20-34-35R (SEQ ID NO:1308) was measured by real time PCR. In parallel the expression of four housekeeping genes—PBGD (GenBank Accession No. BC019323 (SEQ ID NO:1576); amplicon—PBGD-amplicon, SEQ ID NO:531), HPRT1 (GenBank Accession No. NM_{—}000194 (SEQ ID NO:1577); amplicon—HPRT1-amplicon, SEQ ID NO:612), G6PD (GenBank Accession No. NM_{—}000402 (SEQ ID NO:1578); HPRT1-amplicon, SEQ ID NO:615), RPS27A (GenBank Accession No. NM_{—}002954 (SEQ ID NO:1579); RPS27A amplicon, SEQ ID NO:1261) was measured similarly. For each RT sample, the expression of the above amplicon was normalized to the geometric mean of the quantities of the housekeeping genes. The normalized quantity of each RT sample was then divided by the median of the quantities of the normal post-mortem (PM) samples (Sample Nos. 41, 52, 62-67, 69-71 Table 1, above, “Tissue samples in testing panel”), to obtain a value of fold up-regulation for each sample relative to median of the normal PM samples.

[2462] FIG. 36 is a histogram showing over expression of the above-indicated SSRA_HUMAN: Translocon-associated protein, alpha subunit TRAP-alpha Signal sequence receptor alpha subunit SSR-alpha transcripts in cancerous colon samples relative to the normal samples. As is evident from FIG. 36, the expression of SSRA_HUMAN: Translocon-associated protein, alpha subunit, TRAP-alpha Signal sequence receptor alpha subunitSSR-alpha transcripts detectable by the above amplicon in cancer samples was higher in a few samples than in the non-cancerous samples (Sample Nos. 41, 52, 62-67, 69-71, Table 1, above, “Tissue samples in testing panel”). Notably an over-expression of at least 10 fold was found in 7 out of 36 adenocarcinoma samples.

[2463] Primer pairs are also optionally and preferably encompassed within the present invention; for example, for the above experiment, the following primer pair was used as a non-limiting illustrative example only of a suitable primer pair: M77903junc20-34-35F forward primer (SEQ ID NO:1307); and M77903junc20-34-35R reverse primer (SEQ ID NO:1308).

[2464] The present invention also preferably encompasses any amplicon obtained through the use of any suitable primer pair; for example, for the above experiment, the following amplicon was obtained as a non-limiting illustrative example only of a suitable amplicon: M77903junc20-34-35 (SEQ ID NO:1309).

[2465] Primers:

[2466] Combined expression of 6 sequences (M85491seg24 (SEQ ID NO:1276) M77903 seg18 (SEQ ID NO:1303) M77903junc20-28 (SEQ ID NO:1306), Z44808junc8-11 (SEQ ID NO: 1291) Z25299 seg 20 (SEQ ID NO:1294) and HSKITCR seg3 (SEQ ID NO:1309)) in normal and cancerous colon tissues.

[2467] Expression of Ephrin type-B receptor 2 precursor (EC 2.7.1.112) (Tyrosine-protein kinase receptor EPH-3), SSRA_HUMAN, SMO2_HUMAN SPARC related modular calcium-binding protein 2 precursor (Secreted modular calcium-binding protein 2) (SMOC-2) (Smooth muscle-associated protein 2), Secretory leukocyte protease inhibitor Acid-stable proteinase inhibitor and KIT_HUMAN; mast/stem cell growth factor receptor SCFR; Proto-oncogene tyrosine-protein kinase Kit; v-kit; CD117 antigen transcripts detectable by or according to M85491seg24 (SEQ ID NO:1276), M77903 seg18 (SEQ ID NO:1303), M77903junc20-28 (SEQ ID NO:1306), Z44808 junc8-11 (SEQ ID NO:1291), Z25299 seg 20 (SEQ ID NO:1294) and HSKITCR seg3 (SEQ ID NO:1309) amplicons and M85491seg24F (SEQ ID NO:1274), M85491seg24R (SEQ ID NO:1275), M77903 seg18F (SEQ ID NO:1301), M77903 seg18R (SEQ ID NO:1302), M77903junc20-28F (SEQ ID NO:1304), M77903junc20-28R (SEQ ID NO:1305), Z44808 junc8-11F (SEQ ID NO:1289), Z44808 junc8-11R (SEQ ID NO:1290), Z25299 seg 20F (SEQ ID NO:1292), Z25299 seg 20R (SEQ ID NO:1293), HSKITCR seg3F (SEQ ID NO:1307) and HSKITCR seg3R (SEQ ID NO:1308) primers was measured by real time PCR. In parallel the expression of four housekeeping genes—PBGD (GenBank Accession No. BC019323 (SEQ ID NO:1576); amplicon—PBGD-amplicon, SEQ ID NO:531), HPRT1 (GenBank Accession No. NM_{—}000194 (SEQ ID NO:1577); amplicon—HPRT1-amplicon, SEQ ID NO:612), G6PD (GenBank Accession No. NM_{—}000402 (SEQ ID NO:1578); HPRT1-amplicon, SEQ ID NO:615) and RPS27A (GenBank Accession No. NM_{—}002954 (SEQ ID NO:1579); RPS27A amplicon, SEQ ID NO:1261) was measured similarly. For each RT sample, the expression of the above amplicons was normalized to the geometric mean of the quantities of the housekeeping genes. The normalized quantity of each RT sample of each amplicon was then divided by the median of the quantities of the normal post-mortem (PM) samples detected for the same amplicon (Sample Nos. 41, 52, 62-67, 69-71 Table 3, above), to obtain a value of fold up-regulation for each sample relative to median of the normal PM samples. The reciprocal of this ratio was calculated for HSKITCR seg3 (SEQ ID NO:1309), to obtain a value of fold down-regulation for each sample relative to median of the normal PM samples. The expression of HSKITCR transcripts which can be detected by the HSKITCR seg3 (SEQ ID NO:1309), is described also in the patent application “NOVEL NUCLEOTIDE AND AMINO ACID SEQUENCES, AND ASSAYS AND METHODS OF USE THEREOF FOR DIAGNOSIS”, attorney reference number XXXXX, by the same inventors, filed on the same date ans incorporated herein by reference.

[2468] FIGS. 37-38 are histograms showing differential expression of the above-indicated transcripts in cancerous colon samples relative to the normal samples, in different combinations. The number and percentage of samples that exhibit at least 5 fold differential of at least one of the sequences, out of the total number of samples tested is indicated in the bottom.

[2469] As is evident from FIGS. 37-38, differential expression of at least 5 fold in at least one of the sequences was found in 29 out of 36 adenocarcinoma samples in the combinations of 6 transcripts, and in 13 out of 36 adenocarcinoma samples in the combinations of 5 transcripts.

[2470] Statistical analysis was applied to verify the significance of these results, as described below. Threshold of 5 fold differential expression of at least one of the amplicons was found to differentiate between cancer and normal samples as checked by exact fisher test.

[2471] The above values demonstrate statistical significance of the results.

Description for Cluster HSSTROL3

[2472] Cluster HSSTROL3 features 6 transcript(s) and 16 segment(s) of interest, the names for which are given in Tables 1 and 2, respectively, the sequences themselves are given at the end of the application. The selected protein variants are given in table 3.

[2473] These sequences are variants of the known protein Stromelysin-3 precursor (SwissProt accession identifier MM11_HUMAN; known also according to the synonyms EC 3.4.24.-; Matrix metalloproteinase-11; MMP-11; ST3; SL-3), SEQ ID NO: 523, referred to herein as the previously known protein.

[2474] Protein Stromelysin-3 precursor (SEQ ID NO:523) is known or believed to have the following function(s): May play an important role in the progression of epithelial malignancies. The sequence for protein Stromelysin-3 precursor is given at the end of the application, as “Stromelysin-3 precursor amino acid sequence”.

[2475] The following GO Annotation(s) apply to the previously known protein. The following annotation(s) were found: proteolysis and peptidolysis; developmental processes; morphogenesis, which are annotation(s) related to Biological Process; stromelysin 3; calcium binding; zinc binding; hydrolase, which are annotation(s) related to Molecular Function; and extracellular matrix, which are annotation(s) related to Cellular Component.

[2476] The GO assignment relies on information from one or more of the SwissProt/TremB1 Protein knowledgebase, available from <http://www.expasy.ch/sprot/>; or Locuslink, available from <http://www.ncbi.nlm.nih.gov/projects/LocusLink/>.

[2477] Cluster HSSTROL3 can be used as a diagnostic marker according to overexpression of transcripts of this cluster in cancer. Expression of such transcripts in normal tissues is also given according to the previously described methods. The term “number” in the left hand column of the table and the numbers on the y-axis of the figure below refer to weighted expression of ESTs in each category, as “parts per million” (ratio of the expression of ESTs for a particular cluster to the expression of all ESTs in that category, according to parts per million).

[2478] Overall, the following results were obtained as shown with regard to the histograms in FIG. 75 and Table 4. This cluster is overexpressed (at least at a minimum level) in the following pathological conditions: transitional cell carcinoma, epithelial malignant tumors, a mixture of malignant tumors from different tissues and pancreas carcinoma.

[2479] As noted above, cluster HSSTROL3 features 6 transcript(s), which were listed in Table 1 above. These transcript(s) encode for protein(s) which are variant(s) of protein Stromelysin-3 precursor (SEQ ID NO:523). A description of each variant protein according to the present invention is now provided.

[2480] Variant protein HSSTROL3_P4 (SEQ ID NO:524) according to the present invention has an amino acid sequence as given at the end of the application; it is encoded by transcript(s) HSSTROL3_T5 (SEQ ID NO:85). An alignment is given to the known protein (Stromelysin-3 precursor (SEQ ID NO:523)) at the end of the application. One or more alignments to one or more previously published protein sequences are given at the end of the application. A brief description of the relationship of the variant protein according to the present invention to each such aligned protein is as follows:

[2481] Comparison report between HSSTROL3_P4 (SEQ ID NO:524) and MM11_HUMAN (SEQ ID NO:523):

[2482] 1. An isolated chimeric polypeptide encoding for HSSTROL3_P4 (SEQ ID NO:524), comprising a first amino acid sequence being at least 90% homologous to MAPAAWLRSAAARALLPPMLLLLLQPPPLLARALPPDVHHLHAERRGPQPWHAALPSS PAPAPATQEAPRPASSLRPPRCGVPDPSDGLSARNRQKRFVLSGGRWEKTDLTYRILRFP WQLVQEQVRQTMAEALKVWSDVTPLTFTEVHEGRADIMIDFARYW corresponding to amino acids 1-163 of MM11_HUMAN (SEQ ID NO:523), which also corresponds to amino acids 1-163 of HSSTROL3_P4 (SEQ ID NO:524), a bridging amino acid H corresponding to amino acid 164 of HSSTROL3_P4 (SEQ ID NO:524), a second amino acid sequence being at least 90% homologous to GDDLPFDGPGGILAHAFFPKTHREGDVHFDYDETWTIGDDQGTDLLQVAAHEFGHVLG LQHTTAAKALMSAFYTFRYPLSLSPDDCRGVQHLYGQPWPTVTSRTPALGPQAGIDTN EIAPLEPDAPPDACEASFDAVSTIRGELFFFKAGFVWRLRGGQLQPGYPALASRHWQGL PSPVDAAFEDAQGHIWFFQGAQYWVYDGEKPVLGPAPLTELGLVRFPVHAALVWGPE KNKIYFFRGRDYWRFHPSTRRVDSPVPRRATDWRGVPSEIDAAFQDADG corresponding to amino acids 165-445 of MM11_HUMAN (SEQ ID NO:523), which also corresponds to amino acids 165-445 of HSSTROL3_P4 (SEQ ID NO:524), and a third amino acid sequence being at least 70%, optionally at least 80%, preferably at least 85%, more preferably at least 90% and most preferably at least 95% homologous to a polypeptide having the sequence ALGVRQLVGGGHSSRFSHLVVAGLPHACHRKSGSSSQVLCPEPSALLSVAG (SEQ ID NO:1568) corresponding to amino acids 446-496 of HSSTROL3_P4 (SEQ ID NO:524), wherein said first amino acid sequence, bridging amino acid, second amino acid sequence and third amino acid sequence are contiguous and in a sequential order.

[2483] 2. An isolated polypeptide encoding for a tail of HSSTROL3_P4 (SEQ ID NO:524), comprising a polypeptide being at least 70%, optionally at least about 80%, preferably at least about 85%, more preferably at least about 90% and most preferably at least about 95% homologous to the sequence ALGVRQLVGGGHSSRFSHLVVAGLPHACHRKSGSSSQVLCPEPSALLSVAG (SEQ ID NO:1568) in HSSTROL3_P4 (SEQ ID NO:524).

[2484] The location of the variant protein was determined according to results from a number of different software programs and analyses, including analyses from SignalP and other specialized programs. The variant protein is believed to be located as follows with regard to the cell: secreted. The protein localization is believed to be secreted because both signal-peptide prediction programs predict that this protein has a signal peptide, and neither trans-membrane region prediction program predicts that this protein has a trans-membrane region.

[2485] Variant protein HSSTROL3_P4 (SEQ ID NO:524) also has the following non-silent SNPs (Single Nucleotide Polymorphisms) as listed in Table 6, (given according to their position(s) on the amino acid sequence, with the alternative amino acid(s) listed; the last column indicates whether the SNP is known or not; the presence of known SNPs in variant protein HSSTROL3_P4 (SEQ ID NO:524) sequence provides support for the deduced sequence of this variant protein according to the present invention).

[2486] Variant protein HSSTROL3_P4 (SEQ ID NO:524) is encoded by the following transcript(s): HSSTROL3_T5 (SEQ ID NO:85), for which the sequence(s) is/are given at the end of the application. The coding portion of transcript HSSTROL3_T5 (SEQ ID NO:85) is shown in bold; this coding portion starts at position 24 and ends at position 1511. The transcript also has the following SNPs as listed in Table 7 (given according to their position on the nucleotide sequence, with the alternative nucleic acid listed; the last column indicates whether the SNP is known or not; the presence of known SNPs in variant protein HSSTROL3_P4 (SEQ ID NO:524) sequence provides support for the deduced sequence of this variant protein according to the present invention).

[2487] Variant protein HSSTROL3_P5 (SEQ ID NO:525) according to the present invention has an amino acid sequence as given at the end of the application; it is encoded by transcript(s) HSSTROL3_T8 (SEQ ID NO:86) and HSSTROL3_T9 (SEQ ID NO:87). An alignment is given to the known protein (Stromelysin-3 precursor (SEQ ID NO:523)) at the end of the application. One or more alignments to one or more previously published protein sequences are given at the end of the application. A brief description of the relationship of the variant protein according to the present invention to each such aligned protein is as follows:

[2488] Comparison report between HSSTROL3_P5 (SEQ ID NO:525) and MM11_HUMAN (SEQ ID NO:523):

[2489] 1. An isolated chimeric polypeptide encoding for HSSTROL3_P5 (SEQ ID NO:525), comprising a first amino acid sequence being at least 90% homologous to MAPAAWLRSAAARALLPPMLLLLLQPPPLLARALPPDVHHLHAERRGPQPWHAALPSS PAPAPATQEAPRPASSLRPPRCGVPDPSDGLSARNRQKRFVLSGGRWEKTDLTYRILRFP WQLVQEQVRQTMAEALKVWSDVTPLTFTEVHEGRADIMIDFARYW corresponding to amino acids 1-163 of MM11_HUMAN (SEQ ID NO:523), which also corresponds to amino acids 1-163 of HSSTROL3_P5 (SEQ ID NO:525), a bridging amino acid H corresponding to amino acid 164 of HSSTROL3_P5 (SEQ ID NO:525), a second amino acid sequence being at least 90% homologous to GDDLPFDGPGGILAHAFFPKTHREGDVHFDYDETWTIGDDQGTDLLQVAAHEFGHVLG LQHTTAAKALMSAFYTFRYPLSLSPDDCRGVQHLYGQPWPTVTSRTPALGPQAGIDTN EIAPLEPDAPPDACEASFDAVSTIRGELFFFKAGFVWRLRGGQLQPGYPALASRHWQGL PSPVDAAFEDAQGHIWFFQ corresponding to amino acids 165-358 of MM11_HUMAN (SEQ ID NO:523), which also corresponds to amino acids 165-358 of HSSTROL3_P5 (SEQ ID NO:525), and a third amino acid sequence being at least 70%, optionally at least 80%, preferably at least 85%, more preferably at least 90% and most preferably at least 95% homologous to a polypeptide having the sequence ELGFPSSTGRDESLEHCRCQGLHK (SEQ ID NO:1569) corresponding to amino acids 359-382 of HSSTROL3_P5 (SEQ ID NO:525), wherein said first amino acid sequence, bridging amino acid, second amino acid sequence and third amino acid sequence are contiguous and in a sequential order.

[2490] 2. An isolated polypeptide encoding for a tail of HSSTROL3_P5 (SEQ ID NO:525), comprising a polypeptide being at least 70%, optionally at least about 80%, preferably at least about 85%, more preferably at least about 90% and most preferably at least about 95% homologous to the sequence ELGFPSSTGRDESLEHCRCQGLHK (SEQ ID NO:1569) in HSSTROL3_P5 (SEQ ID NO:525).

[2491] The location of the variant protein was determined according to results from a number of different software programs and analyses, including analyses from SignalP and other specialized programs. The variant protein is believed to be located as follows with regard to the cell: secreted. The protein localization is believed to be secreted because both signal-peptide prediction programs predict that this protein has a signal peptide, and neither trans-membrane region prediction program predicts that this protein has a trans-membrane region.

[2492] Variant protein HSSTROL3_P5 (SEQ ID NO:525) also has the following non-silent SNPs (Single Nucleotide Polymorphisms) as listed in Table 8, (given according to their position(s) on the amino acid sequence, with the alternative amino acid(s) listed; the last column indicates whether the SNP is known or not; the presence of known SNPs in variant protein HSSTROL3_P5 (SEQ ID NO:525) sequence provides support for the deduced sequence of this variant protein according to the present invention).

[2493] Variant protein HSSTROL3_P5 (SEQ ID NO:525) is encoded by the following transcript(s): HSSTROL3_T8 (SEQ ID NO:86) and HSSTROL3_T9 (SEQ ID NO:87), for which the sequence(s) is/are given at the end of the application.

[2494] The coding portion of transcript HSSTROL3_T8 (SEQ ID NO:86) is shown in bold; this coding portion starts at position 24 and ends at position 1169. The transcript also has the following SNPs as listed in Table 9 (given according to their position on the nucleotide sequence, with the alternative nucleic acid listed; the last column indicates whether the SNP is known or not; the presence of known SNPs in variant protein HSSTROL3_P5 (SEQ ID NO:525) sequence provides support for the deduced sequence of this variant protein according to the present invention).

[2495] The coding portion of transcript HSSTROL3_T9 (SEQ ID NO:87) is shown in bold; this coding portion starts at position 24 and ends at position 1169. The transcript also has the following SNPs as listed in Table 10 (given according to their position on the nucleotide sequence, with the alternative nucleic acid listed; the last column indicates whether the SNP is known or not; the presence of known SNPs in variant protein HSSTROL3_P5 (SEQ ID NO:525) sequence provides support for the deduced sequence of this variant protein according to the present invention).

[2496] Variant protein HSSTROL3_P7 (SEQ ID NO:526) according to the present invention has an amino acid sequence as given at the end of the application; it is encoded by transcript(s) HSSTROL3_T10 (SEQ ID NO:88). An alignment is given to the known protein (Stromelysin-3 precursor (SEQ ID NO:523)) at the end of the application. One or more alignments to one or more previously published protein sequences are given at the end of the application. A brief description of the relationship of the variant protein according to the present invention to each such aligned protein is as follows:

[2497] Comparison report between HSSTROL3_P7 (SEQ ID NO:526) and MM11_HUMAN (SEQ ID NO:523):

[2498] 1. An isolated chimeric polypeptide encoding for HSSTROL3_P7 (SEQ ID NO:526), comprising a first amino acid sequence being at least 90% homologous to MAPAAWLRSAAARALLPPMLLLLLQPPPLLARALPPDVHHLHAERRGPQPWHAALPSS PAPAPATQEAPRPASSLRPPRCGVPDPSDGLSARNRQKRFVLSGGRWEKTDLTYRILRFP WQLVQEQVRQTMAEALKVWSDVTPLTFTEVHEGRADIMIDFARYW corresponding to amino acids 1-163 of MM11_HUMAN (SEQ ID NO:523), which also corresponds to amino acids 1-163 of HSSTROL3_P7 (SEQ ID NO:526), a bridging amino acid H corresponding to amino acid 164 of HSSTROL3_P7 (SEQ ID NO:526), a second amino acid sequence being at least 90% homologous to GDDLPFDGPGGILAHAFFPKTHREGDVHFDYDETWTIGDDQGTDLLQVAAHEFGHVLG LQHTTAAKALMSAFYTFRYPLSLSPDDCRGVQHLYGQPWPTVTSRTPALGPQAGIDTN EIAPLEPDAPPDACEASFDAVSTIRGELFFFKAGFVWRLRGGQLQPGYPALASRHWQGL PSPVDAAFEDAQGHIWFFQG corresponding to amino acids 165-359 of MM11_HUMAN (SEQ ID NO:523), which also corresponds to amino acids 165-359 of HSSTROL3_P7 (SEQ ID NO:526), and a third amino acid sequence being at least 70%, optionally at least 80%, preferably at least 85%, more preferably at least 90% and most preferably at least 95% homologous to a polypeptide having the sequence TTGVSTPAPGV (SEQ ID NO:1570) corresponding to amino acids 360-370 of HSSTROL3_P7 (SEQ ID NO:526), wherein said first amino acid sequence, bridging amino acid, second amino acid sequence and third amino acid sequence are contiguous and in a sequential order.

[2499] 2. An isolated polypeptide encoding for a tail of HSSTROL3_P7 (SEQ ID NO:526), comprising a polypeptide being at least 70%, optionally at least about 80%, preferably at least about 85%, more preferably at least about 90% and most preferably at least about 95% homologous to the sequence TTGVSTPAPGV (SEQ ID NO:1570) in HSSTROL3_P7 (SEQ ID NO:526).

[2500] The location of the variant protein was determined according to results from a number of different software programs and analyses, including analyses from SignalP and other specialized programs. The variant protein is believed to be located as follows with regard to the cell: secreted. The protein localization is believed to be secreted because both signal-peptide prediction programs predict that this protein has a signal peptide, and neither trans-membrane region prediction program predicts that this protein has a trans-membrane region.

[2501] Variant protein HSSTROL3_P7 (SEQ ID NO:526) also has the following non-silent SNPs (Single Nucleotide Polymorphisms) as listed in Table 11, (given according to their position(s) on the amino acid sequence, with the alternative amino acid(s) listed; the last column indicates whether the SNP is known or not; the presence of known SNPs in variant protein HSSTROL3_P7 (SEQ ID NO:526) sequence provides support for the deduced sequence of this variant protein according to the present invention).

[2502] Variant protein HSSTROL3_P7 (SEQ ID NO:526) is encoded by the following transcript(s): HSSTROL3_T10 (SEQ ID NO:88), for which the sequence(s) is/are given at the end of the application. The coding portion of transcript HSSTROL3_T10 (SEQ ID NO:88) is shown in bold; this coding portion starts at position 24 and ends at position 1133. The transcript also has the following SNPs as listed in Table 12 (given according to their position on the nucleotide sequence, with the alternative nucleic acid listed; the last column indicates whether the SNP is known or not; the presence of known SNPs in variant protein HSSTROL3_P7 (SEQ ID NO:526) sequence provides support for the deduced sequence of this variant protein according to the present invention).

[2503] Variant protein HSSTROL3_P8 (SEQ ID NO:527) according to the present invention has an amino acid sequence as given at the end of the application; it is encoded by transcript(s) HSSTROL3_T11 (SEQ ID NO:505). An alignment is given to the known protein (Stromelysin-3 precursor (SEQ ID NO:523)) at the end of the application. One or more alignments to one or more previously published protein sequences are given at the end of the application. A brief description of the relationship of the variant protein according to the present invention to each such aligned protein is as follows:

[2504] Comparison report between HSSTROL3_P8 (SEQ ID NO:527) and MM 1_HUMAN (SEQ ID NO:523):

[2505] 1. An isolated chimeric polypeptide encoding for HSSTROL3_P8 (SEQ ID NO:527), comprising a first amino acid sequence being at least 90% homologous to MAPAAWLRSAAARALLPPMLLLLLQPPPLLARALPPDVHHLHAERRGPQPWHAALPSS PAPAPATQEAPRPASSLRPPRCGVPDPSDGLSARNRQKRFVLSGGRWEKTDLTYRILRFP WQLVQEQVRQTMAEALKVWSDVTPLTFTEVHEGRADIMIDFARYW corresponding to amino acids 1-163 of MM11_HUMAN (SEQ ID NO:523), which also corresponds to amino acids 1-163 of HSSTROL3_P8 (SEQ ID NO:527), a bridging amino acid H corresponding to amino acid 164 of HSSTROL3_P8 (SEQ ID NO:527), a second amino acid sequence being at least 90% homologous to GDDLPFDGPGGILAHAFFPKTHREGDVHFDYDETWTIGDDQGTDLLQVAAHEFGHVLG LQHTTAAKALMSAFYTFRYPLSLSPDDCRGVQHLYGQPWPTVTSRTPALGPQAGIDTN EIAPLE corresponding to amino acids 165-286 of MM11_HUMAN (SEQ ID NO:523), which also corresponds to amino acids 165-286 of HSSTROL3_P8 (SEQ ID NO:527), and a third amino acid sequence being at least 70%, optionally at least 80%, preferably at least 85%, more preferably at least 90% and most preferably at least 95% homologous to a polypeptide having the sequence VRPCLPVPLLLCWPL (SEQ ID NO:1571) corresponding to amino acids 287-301 of HSSTROL3_P8 (SEQ ID NO:527), wherein said first amino acid sequence, bridging amino acid, second amino acid sequence and third amino acid sequence are contiguous and in a sequential order.

[2506] 2. An isolated polypeptide encoding for a tail of HSSTROL3_P8 (SEQ ID NO:527), comprising a polypeptide being at least 70%, optionally at least about 80%, preferably at least about 85%, more preferably at least about 90% and most preferably at least about 95% homologous to the sequence VRPCLPVPLLLCWPL (SEQ ID NO:1571) in HSSTROL3_P8 (SEQ ID NO:527).

[2507] The location of the variant protein was determined according to results from a number of different software programs and analyses, including analyses from SignalP and other specialized programs. The variant protein is believed to be located as follows with regard to the cell: secreted. The protein localization is believed to be secreted because both signal-peptide prediction programs predict that this protein has a signal peptide, and neither trans-membrane region prediction program predicts that this protein has a trans-membrane region.

[2508] Variant protein HSSTROL3_P8 (SEQ ID NO:527) also has the following non-silent SNPs (Single Nucleotide Polymorphisms) as listed in Table 13, (given according to their position(s) on the amino acid sequence, with the alternative amino acid(s) listed; the last column indicates whether the SNP is known or not; the presence of known SNPs in variant protein HSSTROL3_P8 (SEQ ID NO:527) sequence provides support for the deduced sequence of this variant protein according to the present invention).

[2509] Variant protein HSSTROL3_P8 (SEQ ID NO:527) is encoded by the following transcript(s): HSSTROL3_T11 (SEQ ID NO:505), for which the sequence(s) is/are given at the end of the application. The coding portion of transcript HSSTROL3_T11 (SEQ ID NO:505) is shown in bold; this coding portion starts at position 24 and ends at position 926. The transcript also has the following SNPs as listed in Table 14 (given according to their position on the nucleotide sequence, with the alternative nucleic acid listed; the last column indicates whether the SNP is known or not; the presence of known SNPs in variant protein HSSTROL3_P8 (SEQ ID NO:527) sequence provides support for the deduced sequence of this variant protein according to the present invention).

[2510] Variant protein HSSTROL3_P9 (SEQ ID NO:528) according to the present invention has an amino acid sequence as given at the end of the application; it is encoded by transcript(s) HSSTROL3_T12 (SEQ ID NO:506). An alignment is given to the known protein (Stromelysin-3 precursor (SEQ ID NO:523)) at the end of the application. One or more alignments to one or more previously published protein sequences are given at the end of the application. A brief description of the relationship of the variant protein according to the present invention to each such aligned protein is as follows:

[2511] Comparison report between HSSTROL3_P9 (SEQ ID NO:528) and MM11_HUMAN (SEQ ID NO:523):

[2512] 1. An isolated chimeric polypeptide encoding for HSSTROL3_P9 (SEQ ID NO:528), comprising a first amino acid sequence being at least 90% homologous to MAPAAWLRSAAARALLPPMLLLLLQPPPLLARALPPDVHHLHAERRGPQPWHAALPSS PAPAPATQEAPRPASSLRPPRCGVPDPSDGLSARNRQK corresponding to amino acids 1-96 of MM11_HUMAN (SEQ ID NO:523), which also corresponds to amino acids 1-96 of HSSTROL3_P9 (SEQ ID NO:528), a second amino acid sequence being at least 90% homologous to RILRFPWQLVQEQVRQTMAEALKVWSDVTPLTFTEVHEGRADIMIDFARYW corresponding to amino acids 113-163 of MM11_HUMAN (SEQ ID NO:523), which also corresponds to amino acids 97-147 of HSSTROL3_P9 (SEQ ID NO:528), a bridging amino acid H corresponding to amino acid 148 of HSSTROL3_P9 (SEQ ID NO:528), a third amino acid sequence being at least 90% homologous to GDDLPFDGPGGILAHAFFPKTHREGDVHFDYDETWTIGDDQGTDLLQVAAHEFGHVLG LQHTTAAKALMSAFYTFRYPLSLSPDDCRGVQHLYGQPWPTVTSRTPALGPQAGIDTN EIAPLEPDAPPDACEASFDAVSTIRGELFFFKAGFVWRLRGGQLQPGYPALASRHWQGL PSPVDAAFEDAQGHIWFFQG corresponding to amino acids 165-359 of MM11_HUMAN (SEQ ID NO:523), which also corresponds to amino acids 149-343 of HSSTROL3_P9 (SEQ ID NO:528), and a fourth amino acid sequence being at least 70%, optionally at least 80%, preferably at least 85%, more preferably at least 90% and most preferably at least 95% homologous to a polypeptide having the sequence TTGVSTPAPGV (SEQ ID NO:1570) corresponding to amino acids 344-354 of HSSTROL3_P9 (SEQ ID NO:528), wherein said first amino acid sequence, second amino acid sequence, bridging amino acid, third amino acid sequence and fourth amino acid sequence are contiguous and in a sequential order.

[2513] 2. An isolated chimeric polypeptide encoding for an edge portion of HSSTROL3_P9 (SEQ ID NO:528), comprising a polypeptide having a length “n”, wherein n is at least about 10 amino acids in length, optionally at least about 20 amino acids in length, preferably at least about 30 amino acids in length, more preferably at least about 40 amino acids in length and most preferably at least about 50 amino acids in length, wherein at least two amino acids comprise KR, having a structure as follows: a sequence starting from any of amino acid numbers 96−x to 96; and ending at any of amino acid numbers 97+((n−2)−x), in which x varies from 0 to n−2.

[2514] 3. An isolated polypeptide encoding for a tail of HSSTROL3_P9 (SEQ ID NO:528), comprising a polypeptide being at least 70%, optionally at least about 80%, preferably at least about 85%, more preferably at least about 90% and most preferably at least about 95% homologous to the sequence TTGVSTPAPGV (SEQ ID NO:1570) in HSSTROL3_P9 (SEQ ID NO:528).

[2515] The location of the variant protein was determined according to results from a number of different software programs and analyses, including analyses from SignalP and other specialized programs. The variant protein is believed to be located as follows with regard to the cell: secreted. The protein localization is believed to be secreted because both signal-peptide prediction programs predict that this protein has a signal peptide, and neither trans-membrane region prediction program predicts that this protein has a trans-membrane region.

[2516] Variant protein HSSTROL3_P9 (SEQ ID NO:528) also has the following non-silent SNPs (Single Nucleotide Polymorphisms) as listed in Table 15, (given according to their position(s) on the amino acid sequence, with the alternative amino acid(s) listed; the last column indicates whether the SNP is known or not; the presence of known SNPs in variant protein HSSTROL3_P9 (SEQ ID NO:528) sequence provides support for the deduced sequence of this variant protein according to the present invention).

[2517] Variant protein HSSTROL3_P9 (SEQ ID NO:528) is encoded by the following transcript(s): HSSTROL3_T12 (SEQ ID NO:506), for which the sequence(s) is/are given at the end of the application. The coding portion of transcript HSSTROL3_T12 (SEQ ID NO:506) is shown in bold; this coding portion starts at position 24 and ends at position 1085. The transcript also has the following SNPs as listed in Table 16 (given according to their position on the nucleotide sequence, with the alternative nucleic acid listed; the last column indicates whether the SNP is known or not; the presence of known SNPs in variant protein HSSTROL3_P9 (SEQ ID NO:528) sequence provides support for the deduced sequence of this variant protein according to the present invention).

[2518] As noted above, cluster HSSTROL3 features 16 segment(s), which were listed in Table 2 above and for which the sequence(s) are given at the end of the application. These segment(s) are portions of nucleic acid sequence(s) which are described herein separately because they are of particular interest. A description of each segment according to the present invention is now provided.

[2519] Segment cluster HSSTROL3_node_{—}6 (SEQ ID NO:507) according to the present invention is supported by 14 libraries. The number of libraries was determined as previously described. This segment can be found in the following transcript(s): HSSTROL3_T5 (SEQ ID NO:85), HSSTROL3_T8 (SEQ ID NO:86), HSSTROL3_T9 (SEQ ID NO:87), HSSTROL3_T11 (SEQ ID NO:88), HSSTROL3_T11 (SEQ ID NO:505) and HSSTROL3_T12 (SEQ ID NO:506). Table 17 below describes the starting and ending position of this segment on each transcript.

[2520] Segment cluster HSSTROL3_node_{—}10 (SEQ ID NO:508) according to the present invention is supported by 21 libraries. The number of libraries was determined as previously described. This segment can be found in the following transcript(s): HSSTROL3_T5 (SEQ ID NO:85), HSSTROL3_T8 (SEQ ID NO:86, HSSTROL3_T9 (SEQ ID NO:87), HSSTROL3_T10 (SEQ ID NO:88), HSSTROL3_T11 (SEQ ID NO:505) and HSSTROL3_T12 (SEQ ID NO:506). Table 18 below describes the starting and ending position of this segment on each transcript.

[2521] Segment cluster HSSTROL3_node_{—}13 (SEQ ID NO:509) according to the present invention is supported by 36 libraries. The number of libraries was determined as previously described. This segment can be found in the following transcript(s): HSSTROL3_T5 (SEQ ID NO:85), HSSTROL3_T8 (SEQ ID NO:86), HSSTROL3_T9 (SEQ ID NO:87), HSSTROL3_T10 (SEQ ID NO:88, HSSTROL3_T11 (SEQ ID NO:505) and HSSTROL3_T12 (SEQ ID NO:506). Table 19 below describes the starting and ending position of this segment on each transcript.

[2522] Segment cluster HSSTROL3_node_{—}15 (SEQ ID NO:510) according to the present invention is supported by 47 libraries. The number of libraries was determined as previously described. This segment can be found in the following transcript(s): HSSTROL3_T5 (SEQ ID NO:85), HSSTROL3_T8 (SEQ ID NO:86), HSSTROL3_T9 (SEQ ID NO:87), HSSTROL3_T10 (SEQ ID NO:88, HSSTROL3_T11 (SEQ ID NO:505) and HSSTROL3_T12 (SEQ ID NO:506). Table 20 below describes the starting and ending position of this segment on each transcript.

[2523] Segment cluster HSSTROL3_node_{—}19 (SEQ ID NO:511) according to the present invention is supported by 63 libraries. The number of libraries was determined as previously described. This segment can be found in the following transcript(s): HSSTROL3_T5 (SEQ ID NO:85), HSSTROL3_T8 (SEQ ID NO:86), HSSTROL3_T9 (SEQ ID NO:87), HSSTROL3_T10 (SEQ ID NO:88), HSSTROL3_T11 (SEQ ID NO:505) and HSSTROL3_T12 (SEQ ID NO:506). Table 21 below describes the starting and ending position of this segment on each transcript.

[2524] Segment cluster HSSTROL3_node_{—}21 (SEQ ID NO:512) according to the present invention is supported by 61 libraries. The number of libraries was determined as previously described. This segment can be found in the following transcript(s): HSSTROL3_T5 (SEQ ID NO:85), HSSTROL3_T8 (SEQ ID NO:86, HSSTROL3_T9 (SEQ ID NO:87), HSSTROL3_T10 (SEQ ID NO:88), HSSTROL3_T11 (SEQ ID NO:505) and HSSTROL3_T12 (SEQ ID NO:506). Table 22 below describes the starting and ending position of this segment on each transcript.

[2525] Segment cluster HSSTROL3_node_{—}24 (SEQ ID NO:513) according to the present invention is supported by 7 libraries. The number of libraries was determined as previously described. This segment can be found in the following transcript(s): HSSTROL3_T8 (SEQ ID NO:86) and HSSTROL3_T9 (SEQ ID NO:87). Table 23 below describes the starting and ending position of this segment on each transcript.

[2526] Segment cluster HSSTROL3_node_{—}25 (SEQ ID NO:514) according to the present invention is supported by 13 libraries. The number of libraries was determined as previously described. This segment can be found in the following transcript(s): HSSTROL3_T8 (SEQ ID NO:86). Table 24 below describes the starting and ending position of this segment on each transcript.

[2527] Segment cluster HSSTROL3_node_{—}26 (SEQ ID NO:515) according to the present invention is supported by 55 libraries. The number of libraries was determined as previously described. This segment can be found in the following transcript(s): HSSTROL3_T5 (SEQ ID NO:85), HSSTROL3_T8 (SEQ ID NO:86), HSSTROL3_T9 (SEQ ID NO:87) and HSSTROL3_T11 (SEQ ID NO:505). Table 25 below describes the starting and ending position of this segment on each transcript.

[2528] Segment cluster HSSTROL3_node_{—}28 (SEQ ID NO:516) according to the present invention is supported by 10 libraries. The number of libraries was determined as previously described. This segment can be found in the following transcript(s): HSSTROL3_T5 (SEQ ID NO:85), HSSTROL3_T9 (SEQ ID NO:87) and HSSTROL3_T10 (SEQ ID NO:88). Table 26 below describes the starting and ending position of this segment on each transcript.

[2529] Segment cluster HSSTROL3_node_{—}29 (SEQ ID NO:517) according to the present invention is supported by 109 libraries. The number of libraries was determined as previously described. This segment can be found in the following transcript(s): HSSTROL3_T5 (SEQ ID NO:85), HSSTROL3_T8 (SEQ ID NO:86, HSSTROL3_T9 (SEQ ID NO:87), HSSTROL3_T10 (SEQ ID NO:88), HSSTROL3_T11 (SEQ ID NO:505) and HSSTROL3_T12 (SEQ ID NO:506). Table 27 below describes the starting and ending position of this segment on each transcript.

[2530] According to an optional embodiment of the present invention, short segments related to the above cluster are also provided. These segments are up to about 120 bp in length, and so are included in a separate description.

[2531] Segment cluster HSSTROL3_node_{—}11 (SEQ ID NO:518) according to the present invention is supported by 25 libraries. The number of libraries was determined as previously described. This segment can be found in the following transcript(s): HSSTROL3_T5 (SEQ ID NO:85), HSSTROL3_T8 (SEQ ID NO:86, HSSTROL3_T9 (SEQ ID NO:87), HSSTROL3_T10 (SEQ ID NO:88) and HSSTROL3_T11 (SEQ ID NO:505). Table 28 below describes the starting and ending position of this segment on each transcript.

[2532] Segment cluster HSSTROL3_node_{—}17 (SEQ ID NO:519) according to the present invention is supported by 45 libraries. The number of libraries was determined as previously described. This segment can be found in the following transcript(s): HSSTROL3_T5 (SEQ ID NO:85), HSSTROL3_T8 (SEQ ID NO:86, HSSTROL3_T9 (SEQ ID NO:87), HSSTROL3_T10 (SEQ ID NO:88), HSSTROL3_T11 (SEQ ID NO:505) and HSSTROL3_T12 (SEQ ID NO:506). Table 29 below describes the starting and ending position of this segment on each transcript.

[2533] Segment cluster HSSTROL3_node_{—}18 (SEQ ID NO:520) according to the present invention can be found in the following transcript(s): HSSTROL3_T5 (SEQ ID NO:85), HSSTROL3_T8 (SEQ ID NO:86, HSSTROL3_T9 (SEQ ID NO:87), HSSTROL3_T10 (SEQ ID NO:88), HSSTROL3_T11 (SEQ ID NO:505) and HSSTROL3_T12 (SEQ ID NO:506). Table 30 below describes the starting and ending position of this segment on each transcript.

[2534] Segment cluster HSSTROL3_node_{—}20 (SEQ ID NO:521) according to the present invention is supported by 1 libraries. The number of libraries was determined as previously described. This segment can be found in the following transcript(s): HSSTROL3_T11 (SEQ ID NO:505). Table 31 below describes the starting and ending position of this segment on each transcript.

[2535] Segment cluster HSSTROL3_node_{—}27 (SEQ ID NO:522) according to the present invention is supported by 50 libraries. The number of libraries was determined as previously described. This segment can be found in the following transcript(s): HSSTROL3_T5 (SEQ ID NO:85), HSSTROL3_T8 (SEQ ID NO:86, HSSTROL3_T9 (SEQ ID NO:87), HSSTROL3_T11 (SEQ ID NO:88), HSSTROL3_T11 (SEQ ID NO:505) and HSSTROL3_T12 (SEQ ID NO:506). Table 32 below describes the starting and ending position of this segment on each transcript.

Variant protein alignment to the previously known protein:

Sequence name: MM11_HUMAN (SEQ ID NO:523)

Sequence Documentation:

Alignment of: HSSTROL3_P4 (SEQ ID NO:524)×MM111HUMAN (SEQ ID NO:523) ••

Alignment segment 1/1:

Alignment:

Sequence name: MM11_HUMAN (SEQ ID NO:523)

Sequence Documentation:

Alignment of: HSSTROL3_P5 (SEQ ID NO:525)×MM111HUMAN (SEQ ID NO:523) ••

Alignment segment 1/1:

Alignment:

Sequence name: MM11_HUMAN (SEQ ID NO:523)

Sequence Documentation:

Alignment of: HSSTROL3_P7 (SEQ ID NO:526)×MM11_HUMAN (SEQ ID NO:523) ••

Alignment segment 1/1:

Alignment:

Sequence name: MM11_HUMAN (SEQ ID NO:523)

Sequence Documentation:

Alignment of: HSSTROL3_P8 (SEQ ID NO:527)×MM11_HUMAN (SEQ ID NO:523) ••

Alignment segment 1/1:

Alignment:

Sequence name: MM11_HUMAN (SEQ ID NO:523)

Sequence Documentation:

Alignment of: HSSTROL3_P9 (SEQ ID NO:528)×MM11_HUMAN (SEQ ID NO:523).

Alignment segment 1/1:

Alignment:

Expression of Homo sapiens matrix metalloproteinase 11 (stromelysin 3) (MMP11) HSSTROL3 transcripts which are detectable by amplicon as depicted in sequence name HSSTROL3 junc2′-27 (SEQ ID NO:1312) in normal and cancerous colon tissues

[2536] Expression of Homo sapiens matrix metalloproteinase 11 (stromelysin 3) (MMP11) transcripts detectable by or according to junc21-27, HSSTROL3 junc21-27 amplicon (SEQ ID NO:1312) and primers HSSTROL3 junc21-27F (SEQ ID NO:1310) and HSSTROL3 junc21-27R (SEQ ID NO:1311) was measured by real time PCR. In parallel the expression of four housekeeping genes—PBGD (GenBank Accession No. BC019323 (SEQ ID NO:1576); amplicon—PBGD-amplicon, SEQ ID NO:531), HPRT1 (GenBank Accession No. NM_{—}000194 (SEQ ID NO:1577); amplicon—HPRT1-amplicon, SEQ ID NO:612), G6PD (GenBank Accession No. NM_{—}000402 (SEQ ID NO:1578); HPRT1-amplicon, SEQ ID NO:615), RPS27A (GenBank Accession No. NM_{—}002954 (SEQ ID NO:1579); RPS27A amplicon, SEQ ID NO:1261), was measured similarly. For each RT sample, the expression of the above amplicon was normalized to the geometric mean of the quantities of the housekeeping genes. The normalized quantity of each RT sample was then divided by the median of the quantities of the normal post-mortem (PM) samples (Sample Nos. 41,52,62-67, 69-71, Table 1, above, “Tissue samples in testing panel”), to obtain a value of fold up-regulation for each sample relative to median of the normal PM samples.

[2537] FIG. 73 is a histogram showing over expression of the above-indicated Homo sapiens matrix metalloproteinase 11 (stromelysin 3) (MMP11) transcripts in cancerous colon samples relative to the normal samples.

[2538] As is evident from FIG. 73, the expression of Homo sapiens matrix metalloproteinase 11 (stromelysin 3) (MMP11) transcripts detectable by the above amplicon(s) in cancer samples was higher than in the non-cancerous samples (Sample Nos. 41, 52, 62-67, 69-71 Table 1, “Tissue samples in testing panel”). Notably an over-expression of at least 6 fold was found in 14 out of 36 adenocarcinoma samples.

[2539] Primer pairs are also optionally and preferably encompassed within the present invention; for example, for the above experiment, the following primer pair was used as a non-limiting illustrative example only of a suitable primer pair: HSSTROL3 junc21-27F forward primer (SEQ ID NO:1310); and HSSTROL3 junc21-27R reverse primer (SEQ ID NO:1311).

[2540] The present invention also preferably encompasses any amplicon obtained through the use of any suitable primer pair; for example, for the above experiment, the following amplicon was obtained as a non-limiting illustrative example only of a suitable amplicon: HSSTROL3 junc21-27 (SEQ ID NO:1312).

[2541] Primers:

Expression of Homo sapiens matrix metalloproteinase 11 (stromelysin 3) (MMP1) HSSTROL3 transcripts which are detectable by amplicon as depicted in sequence name HSSTROL3 seg25 (SEQ ID NO:1315) in normal and cancerous colon tissues

[2542] Expression of Homo sapiens matrix metalloproteinase 11 (stromelysin 3) (MMP11) transcripts detectable by or according to seg25, amplicon (SEQ ID NO:1315) and primers HSSTROL3 seg25F (SEQ ID NO:1313) and HSSTROL3 seg25R (SEQ ID NO:1314) was measured by real time PCR. In parallel the expression of four housekeeping genes—PBGD (GenBank Accession No. BC019323 (SEQ ID NO:1576); amplicon—PBGD-amplicon, SEQ ID NO:531), HPRT1 (GenBank Accession No. NM_{—}000194 (SEQ ID NO:1577); amplicon—HPRT1-amplicon, SEQ ID NO:612), G6PD (GenBank Accession No. NM_{—}000402 (SEQ ID NO:1578); HPRT1-amplicon, SEQ ID NO:615), RPS27A (GenBank Accession No. NM_{—}002954 (SEQ ID NO:1579); RPS27A amplicon, SEQ ID NO:1261), was measured similarly. For each RT sample, the expression of the above amplicon was normalized to the geometric mean of the quantities of the housekeeping genes. The normalized quantity of each RT sample was then divided by the median of the quantities of the normal post-mortem (PM) samples (Sample Nos. 41, 52, 62-67, 69-71, Table 1, “Tissue samples in testing panel”, above), to obtain a value of fold up-regulation for each sample relative to median of the normal PM samples.

[2543] FIG. 74 is a histogram showing over expression of the above-indicated Homo sapiens matrix metalloproteinase 11 (stromelysin 3) (MMP11) transcripts in cancerous colon samples relative to the normal samples.

[2544] As is evident from FIG. 74, the expression of Homo sapiens matrix metalloproteinase 11 (stromelysin 3) (MMP11) transcripts detectable by the above amplicon(s) was higher in a few cancer samples than in the non-cancerous samples (Sample Nos. 41, 52, 62-67, 69-71 Table 1, “Tissue samples in testing panel”). Notably an over-expression of at least 5 fold was found in 5 out of 36 adenocarcinoma samples.

[2545] Primer pairs are also optionally and preferably encompassed within the present invention; for example, for the above experiment, the following primer pair was used as a non-limiting illustrative example only of a suitable primer pair: HSSTROL3 seg25F forward primer (SEQ ID NO:1313); and HSSTROL3 seg25R reverse primer (SEQ ID NO:1314).

[2546] The present invention also preferably encompasses any amplicon obtained through the use of any suitable primer pair; for example, for the above experiment, the following amplicon was obtained as a non-limiting illustrative example only of a suitable amplicon: HSSTROL3 seg25 (SEQ ID NO:1315).

[2547] Primers:

Expression of Homo sapiens matrix metalloproteinase 11 (stromelysin 3) (MMP11) HSSTROL3 transcripts which are detectable by amplicon as depicted in sequence name HSSTROL3 seg24 (SEQ ID NO:1318) in normal and cancerous colon tissues

[2548] Expression of Homo sapiens matrix metalloproteinase 11 (stromelysin 3) (MMP11) transcripts detectable by or according to seg24, HSSTROL3 seg24 amplicon (SEQ ID NO:1318) and primers HSSTROL3 seg24F (SEQ ID NO:1316) and HSSTROL3 seg24R (SEQ ID NO: 1317) was measured by real time PCR. In parallel the expression of four housekeeping genes—PBGD (GenBank Accession No. BC019323 (SEQ ID NO:1576); amplicon—PBGD-amplicon, SEQ ID NO: 531), HPRT1 (GenBank Accession No. NM_{—}000194 (SEQ ID NO:1577); amplicon—HPRT1-amplicon, SEQ ID NO: 612), G6PD (GenBank Accession No. NM_{—}000402 (SEQ ID NO:1578); G6PD amplicon, SEQ ID NO:615), RPS27A (GenBank Accession No. NM_{—}002954 (SEQ ID NO:1579); RPS27A amplicon, SEQ ID NO:1261), was measured similarly. For each RT sample, the expression of the above amplicon was normalized to the geometric mean of the quantities of the housekeeping genes. The normalized quantity of each RT sample was then divided by the median of the quantities of the normal post-mortem (PM) samples (Sample Nos. 41, 52, 62-67, 69-71, Table 1, above, “Tissue samples in testing panel”), to obtain a value of fold differential expression for each sample relative to median of the normal PM samples.

[2549] In one experiment that was carried out no differential expression in the cancerous samples relative to the normal PM samples was observed.

[2550] Primer pairs are also optionally and preferably encompassed within the present invention; for example, for the above experiment, the following primer pair was used as a non-limiting illustrative example only of a suitable primer pair: HSSTROL3 seg24F forward primer (SEQ ID NO:1316); and HSSTROL3 seg24R reverse primer (SEQ ID NO:1317).

[2551] The present invention also preferably encompasses any amplicon obtained through the use of any suitable primer pair; for example, for the above experiment, the following amplicon was obtained as a non-limiting illustrative example only of a suitable amplicon: HSSTROL3 seg24 (SEQ ID NO:1318).

[2552] Primers:

Expression of Stromelysin-3 precursor (Matrix metalloproteinase-11) (MMP-11) (ST3) (SL-3) HSSTROL3 transcripts which are detectable by amplicon as depicted in sequence name HSSTROL3 seg24 (SEQ ID NO:1318) in different normal tissues

[2553] Expression of Stromelysin-3 precursor (EC 3.4.24.-) (Matrix metalloproteinase-11) (MMP-11) (ST3) (SL-3 transcripts detectable by or according to HSSTROL3 seg24 amplicon (SEQ ID NO: 1318) and HSSTROL3 seg24F (SEQ ID NO:1316) and HSSTROL3 seg24R (SEQ ID NO: 1317) was measured by real time PCR. In parallel the expression of four housekeeping genes UBC (GenBank Accession No. BC000449 (SEQ ID NO:1582); amplicon—Ubiquitin-amplicon, SEQ ID NO:1270) and SDHA (GenBank Accession No. NM_{—}004168 (SEQ ID NO:1583); amplicon—SDHA-amplicon, SEQ ID NO:1273), RPL19 (GenBank Accession No. NM_{—}000981 (SEQ ID NO:1580); RPL19 amplicon, SEQ ID NO:1264), TATA box (GenBank Accession No. NM_{—}003194 (SEQ ID NO:1581); TATA amplicon, SEQ ID NO:1267) was measured similarly. For each RT sample, the expression of the above amplicon was normalized to the geometric mean of the quantities of the housekeeping genes. The normalized quantity of each RT sample was then divided by the median of the quantities of the lung samples (Sample Nos. 15-17 above), to obtain a value of relative expression of each sample relative to median of the lung samples.

[2554] Primers:

The results are presented in FIG. 76, showing the expression of of Stromelysin-3 HSSTROL3 transcripts which are detectable by amplicon as depicted in sequence name HSSTROL3 seg24 in different normal tissues.

Description for Cluster AA583399

[2555] Cluster AA583399 features 16 transcript(s) and 20 segment(s) of interest, the names for which are given in Tables 1 and 2, respectively, the sequences themselves are given at the end of the application. The selected protein variants are given in table 3.

[2556] These sequences are variants of the known protein Myeloma overexpressed gene protein (SwissProt accession identifier MYEO_HUMAN; known also according to the synonyms Oncogene in multiple myeloma), SEQ ID NO: 679, referred to herein as the previously known protein.

[2557] The sequence for protein Myeloma overexpressed gene protein (SEQ ID NO:679) is given at the end of the application, as “Myeloma overexpressed gene protein amino acid sequence”. Known polymorphisms for this sequence are as shown in Table 4.

[2558] Cluster AA583399 can be used as a diagnostic marker according to overexpression of transcripts of this cluster in cancer. Expression of such transcripts in normal tissues is also given according to the previously described methods. The term “number” in the left hand column of the table and the numbers on the y-axis of the figure below refer to weighted expression of ESTs in each category, as “parts per million” (ratio of the expression of ESTs for a particular cluster to the expression of all ESTs in that category, according to parts per million).

[2559] Overall, the following results were obtained as shown with regard to the histograms in FIG. 40 and Table 5. This cluster is overexpressed (at least at a minimum level) in the following pathological conditions: brain malignant tumors, epithelial malignant tumors, a mixture of malignant tumors from different tissues and gastric carcinoma.

[2560] As noted above, cluster AA583399 features 16 transcript(s), which were listed in Table 1 above. These transcript(s) encode for protein(s) which are variant(s) of protein Myeloma overexpressed gene protein (SEQ ID NO:679). A description of each variant protein according to the present invention is now provided.

[2561] Variant protein AA583399_PEA_{—}1_P3 (SEQ ID NO:683) according to the present invention has an amino acid sequence as given at the end of the application; it is encoded by transcript(s) AA583399_PEA_{—}1_T1 (SEQ ID NO:644). The location of the variant protein was determined according to results from a number of different software programs and analyses, including analyses from SignalP and other specialized programs. The variant protein is believed to be located as follows with regard to the cell: secreted. The protein localization is believed to be secreted because both signal-peptide prediction programs predict that this protein has a signal peptide.

[2562] Variant protein AA583399_PEA_{—}1_P3 (SEQ ID NO:683) also has the following non-silent SNPs (Single Nucleotide Polymorphisms) as listed in Table 7, (given according to their position(s) on the amino acid sequence, with the alternative amino acid(s) listed; the last column indicates whether the SNP is known or not; the presence of known SNPs in variant protein AA583399_PEA_{—}1_P3 (SEQ ID NO:683) sequence provides support for the deduced sequence of this variant protein according to the present invention).

[2563] Variant protein AA583399_PEA_{—}1_P3 (SEQ ID NO:683) is encoded by the following transcript(s): AA583399_PEA_{—}1_T1 (SEQ ID NO:644), for which the sequence(s) is/are given at the end of the application. The coding portion of transcript AA583399_PEA_{—}1_T1 (SEQ ID NO:644) is shown in bold; this coding portion starts at position 587 and ends at position 1525. The transcript also has the following SNPs as listed in Table 8 (given according to their position on the nucleotide sequence, with the alternative nucleic acid listed; the last column indicates whether the SNP is known or not; the presence of known SNPs in variant protein AA583399_PEA_{—}1_P3 (SEQ ID NO:683) sequence provides support for the deduced sequence of this variant protein according to the present invention).

[2564] Variant protein AA583399_PEA_{—}1_P2 (SEQ ID NO:684) according to the present invention has an amino acid sequence as given at the end of the application; it is encoded by transcript(s) AA583399_PEA_{—}1_T3 (SEQ ID NO:646). An alignment is given to the known protein (Myeloma overexpressed gene protein (SEQ ID NO:679)) at the end of the application. One or more alignments to one or more previously published protein sequences are given at the end of the application. A brief description of the relationship of the variant protein according to the present invention to each such aligned protein is as follows:

[2565] Comparison report between AA583399_PEA_{—}1_P2 (SEQ ID NO:684) and MYEO_HUMAN_V1 (SEQ ID NO: 680):

[2566] 1. An isolated chimeric polypeptide encoding for AA583399_PEA_{—}1_P2 (SEQ ID NO:684), comprising a first amino acid sequence being at least 90% homologous to MFTRQAGHFVEGSKAGRSRGRLCLSQALRVAVRGAFVSLWFAAGAGDRERNKGDKG AQTGAGLSQEAEDVDVSRARRVTDAPQGTLCGTGNRNSGSQSARVVGVAHLGEAFRV GVEQAISSCPEEVHGRHGLSMEIMWARMDVALRSPGRGLLAGAGALCMTLAESSCPD YERGRRACLTLHRHPTPHCSTWGLPLRVAGSWLTVVTVEALGGWRMGVRRTGQVGP TMHPPPVSGASPLLLHHLLLLLLIIILTC corresponding to amino acids 59-313 of MYEO_HUMAN_V1 (SEQ ID NO:680), which also corresponds to amino acids 1-255 of AA583399_PEA_{—}1_P2 (SEQ ID NO:684).

[2567] It should be noted that the known protein sequence (MYEO_HUMAN (SEQ ID NO:679)) has one or more changes than the sequence given at the end of the application and named as being the amino acid sequence for MYEO_HUMAN_V1 (SEQ ID NO:680). These changes were previously known to occur and are listed in the table below.

[2568] The location of the variant protein was determined according to results from a number of different software programs and analyses, including analyses from SignalP and other specialized programs. The variant protein is believed to be located as follows with regard to the cell: secreted. The protein localization is believed to be secreted because one of the two signal-peptide prediction programs (HMM:Signal peptide,NN:NO) predicts that this protein has a signal peptide.

[2569] Variant protein AA583399_PEA_{—}1_P2 (SEQ ID NO:684) is encoded by the following transcript(s): AA583399_PEA_{—}1_T3 (SEQ ID NO:646), for which the sequence(s) is/are given at the end of the application. The coding portion of transcript AA583399_PEA_{—}1_T3 (SEQ ID NO:646) is shown in bold; this coding portion starts at position 689 and ends at position 1453. The transcript also has the following SNPs as listed in Table 10 (given according to their position on the nucleotide sequence, with the alternative nucleic acid listed; the last column indicates whether the SNP is known or not; the presence of known SNPs in variant protein AA583399_PEA_{—}1_P2 (SEQ ID NO:684) sequence provides support for the deduced sequence of this variant protein according to the present invention).

[2570] Variant protein AA583399_PEA_{—}1_P4 (SEQ ID NO:685) according to the present invention has an amino acid sequence as given at the end of the application; it is encoded by transcript(s) AA583399_PEA_{—}1_T7 (SEQ ID NO:650). An alignment is given to the known protein (Myeloma overexpressed gene protein (SEQ ID NO:679)) at the end of the application. One or more alignments to one or more previously published protein sequences are given at the end of the application. A brief description of the relationship of the variant protein according to the present invention to each such aligned protein is as follows:

[2571] Comparison report between AA583399_PEA_{—}1_P4 (SEQ ID NO:685) and MYEO_HUMAN_V1 (SEQ ID NO:680):

[2572] 1. An isolated chimeric polypeptide encoding for AA583399_PEA_{—}1_P4 (SEQ ID NO:685), comprising a first amino acid sequence being at least 70%, optionally at least 80%, preferably at least 85%, more preferably at least 90% and most preferably at least 95% homologous to a polypeptide having the sequence MSDLFIGFLVCSLSPLGTGTRCSCSPG (SEQ ID NO:1479) corresponding to amino acids 1-27 of AA583399_PEA_{—}1_P4 (SEQ ID NO:685), and a second amino acid sequence being at least 90% homologous to RNSGSQSARVVGVAHLGEAFRVGVEQAISSCPEEVHGRHGLSMEIMWARMDVALRSP GRGLLAGAGALCMTLAESSCPDYERGRRACLTLHRHPTPHCSTWGLPLRVAGSWLTV VTVEALGGWRMGVRRTGQVGPTMHPPPVSGASPLLLHHLLLLLLIIILTC corresponding to amino acids 150-313 of MYEO_HUMAN_V1 (SEQ ID NO:680), which also corresponds to amino acids 28-191 of AA583399_PEA_{—}1_P4 (SEQ ID NO:685), wherein said first amino acid sequence and second amino acid sequence are contiguous and in a sequential order.

[2573] 2. An isolated polypeptide encoding for a head of AA583399_PEA_{—}1_P4 (SEQ ID NO:685), comprising a polypeptide being at least 70%, optionally at least about 80%, preferably at least about 85%, more preferably at least about 90% and most preferably at least about 95% homologous to the sequence MSDLFIGFLVCSLSPLGTGTRCSCSPG (SEQ ID NO:1479) of AA583399_PEA_{—}1_P4 (SEQ ID NO:685).

[2574] It should be noted that the known protein sequence (MYEO_HUMAN (SEQ ID NO:679)) has one or more changes than the sequence given at the end of the application and named as being the amino acid sequence for MYEO_HUMAN_V1 (SEQ ID NO:680). These changes were previously known to occur and are listed in the table below.

[2575] The location of the variant protein was determined according to results from a number of different software programs and analyses, including analyses from SignalP and other specialized programs. The variant protein is believed to be located as follows with regard to the cell: secreted. The protein localization is believed to be secreted because both signal-peptide prediction programs predict that this protein has a signal peptide.

[2576] Variant protein AA583399_PEA_{—}1_P4 (SEQ ID NO:685) also has the following non-silent SNPs (Single Nucleotide Polymorphisms) as listed in Table 12, (given according to their position(s) on the amino acid sequence, with the alternative amino acid(s) listed; the last column indicates whether the SNP is known or not; the presence of known SNPs in variant protein AA583399_PEA_{—}1_P4 (SEQ ID NO:685) sequence provides support for the deduced sequence of this variant protein according to the present invention).

[2577] Variant protein AA583399_PEA_{—}1_P4 (SEQ ID NO:685) is encoded by the following transcript(s): AA583399_PEA_{—}1_T7 (SEQ ID NO:650), for which the sequence(s) is/are given at the end of the application. The coding portion of transcript AA583399_PEA_{—}1_T7 (SEQ ID NO:650) is shown in bold; this coding portion starts at position 789 and ends at position 1361. The transcript also has the following SNPs as listed in Table 13 (given according to their position on the nucleotide sequence, with the alternative nucleic acid listed; the last column indicates whether the SNP is known or not; the presence of known SNPs in variant protein AA583399_PEA_{—}1_P4 (SEQ ID NO:685) sequence provides support for the deduced sequence of this variant protein according to the present invention).

[2578] Variant protein AA583399_PEA_{—}1_P5 (SEQ ID NO:686) according to the present invention has an amino acid sequence as given at the end of the application; it is encoded by transcript(s) AA583399_PEA_{—}1_T8 (SEQ ID NO:651). An alignment is given to the known protein (Myeloma overexpressed gene protein (SEQ ID NO:679)) at the end of the application. One or more alignments to one or more previously published protein sequences are given at the end of the application. A brief description of the relationship of the variant protein according to the present invention to each such aligned protein is as follows:

[2579] Comparison report between AA583399_PEA_{—}1_P5 (SEQ ID NO:686) and MYEO_HUMAN_V2 (SEQ ID NO: 681):

[2580] 1. An isolated chimeric polypeptide encoding for AA583399_PEA_{—}1_P5 (SEQ ID NO:686), comprising a first amino acid sequence being at least 90% homologous to MEIMWARMDVALRSPGRGLLAGAGALCMTLAESSCPDYERGRRACLTLHRHPTPHCS TWGLPLRVAGSWLTVVTVEALGGWRMGVRRTGQVGPTMHPPPVSGASPLLLHHLLLL LLIIILTC corresponding to amino acids 192-313 of MYEO_HUMAN_V2 (SEQ ID NO:681), which also corresponds to amino acids 1-122 of AA583399_PEA_{—}1_P5 (SEQ ID NO:686).

[2581] It should be noted that the known protein sequence (MYEO_HUMAN (SEQ ID NO:679)) has one or more changes than the sequence given at the end of the application and named as being the amino acid sequence for MYEO_HUMAN_V2 (SEQ ID NO:681). These changes were previously known to occur and are listed in the table below.

[2582] The location of the variant protein was determined according to results from a number of different software programs and analyses, including analyses from SignalP and other specialized programs. The variant protein is believed to be located as follows with regard to the cell: secreted. The protein localization is believed to be secreted because one of the two signal-peptide prediction programs (HMM:Signal peptide,NN:NO) predicts that this protein has a signal peptide.

[2583] Variant protein AA583399_PEA_{—}1_P5 (SEQ ID NO:686) also has the following non-silent SNPs (Single Nucleotide Polymorphisms) as listed in Table 15, (given according to their position(s) on the amino acid sequence, with the alternative amino acid(s) listed; the last column indicates whether the SNP is known or not; the presence of known SNPs in variant protein AA583399_PEA_{—}1_P5 (SEQ ID NO:686) sequence provides support for the deduced sequence of this variant protein according to the present invention).

[2584] Variant protein AA583399_PEA_{—}1_P5 (SEQ ID NO:686) is encoded by the following transcript(s): AA583399_PEA_{—}1_T8 (SEQ ID NO:651), for which the sequence(s) is/are given at the end of the application. The coding portion of transcript AA583399_PEA_{—}1_T8 (SEQ ID NO:651) is shown in bold; this coding portion starts at position 849 and ends at position 1214. The transcript also has the following SNPs as listed in Table 16 (given according to their position on the nucleotide sequence, with the alternative nucleic acid listed; the last column indicates whether the SNP is known or not; the presence of known SNPs in variant protein AA583399_PEA_{—}1_P5 (SEQ ID NO:686) sequence provides support for the deduced sequence of this variant protein according to the present invention).

[2585] Variant protein AA583399_PEA_{—}1_P6 (SEQ ID NO:687) according to the present invention has an amino acid sequence as given at the end of the application; it is encoded by transcript(s) AA583399_PEA_{—}1_T12 (SEQ ID NO:655). The location of the variant protein was determined according to results from a number of different software programs and analyses, including analyses from SignalP and other specialized programs. The variant protein is believed to be located as follows with regard to the cell: intracellularly. The protein localization is believed to be intracellularly because neither of the trans-membrane region prediction programs predicted a trans-membrane region for this protein. In addition both signal-peptide prediction programs predict that this protein is a non-secreted protein.

[2586] Variant protein AA583399_PEA_{—}1_P6 (SEQ ID NO:687) is encoded by the following transcript(s): AA583399_PEA_{—}1_T12 (SEQ ID NO:655), for which the sequence(s) is/are given at the end of the application. The coding portion of transcript AA583399_PEA_{—}1_T12 (SEQ ID NO:655) is shown in bold; this coding portion starts at position 39 and ends at position 371. The transcript also has the following SNPs as listed in Table 17 (given according to their position on the nucleotide sequence, with the alternative nucleic acid listed; the last column indicates whether the SNP is known or not; the presence of known SNPs in variant protein AA583399_PEA_{—}1_P6 (SEQ ID NO:687) sequence provides support for the deduced sequence of this variant protein according to the present invention).

[2587] Variant protein AA583399_PEA_{—}1_P8 (SEQ ID NO:688) according to the present invention has an amino acid sequence as given at the end of the application; it is encoded by transcript(s) AA583399_PEA_{—}1_T17 (SEQ ID NO:658). The location of the variant protein was determined according to results from a number of different software programs and analyses, including analyses from SignalP and other specialized programs. The variant protein is believed to be located as follows with regard to the cell: intracellularly. The protein localization is believed to be intracellularly because neither of the trans-membrane region prediction programs predicted a trans-membrane region for this protein. In addition both signal-peptide prediction programs predict that this protein is a non-secreted protein.

[2588] Variant protein AA583399_PEA_{—}1_P8 (SEQ ID NO:688) is encoded by the following transcript(s): AA583399_PEA_{—}1_T17 (SEQ ID NO:658), for which the sequence(s) is/are given at the end of the application. The coding portion of transcript AA583399_PEA_{—}1_T17 (SEQ ID NO:658) is shown in bold; this coding portion starts at position 191 and ends at position 400.

[2589] Variant protein AA583399_PEA_{—}1_P10 (SEQ ID NO:689) according to the present invention has an amino acid sequence as given at the end of the application; it is encoded by transcript(s) AA583399_PEA_{—}1_T0 (SEQ ID NO:643). An alignment is given to the known protein (Myeloma overexpressed gene protein (SEQ ID NO:679)) at the end of the application. One or more alignments to one or more previously published protein sequences are given at the end of the application. A brief description of the relationship of the variant protein according to the present invention to each such aligned protein is as follows:

[2590] Comparison report between AA583399_PEA_{—}1_P10 (SEQ ID NO:689) and MYEO_HUMAN_V3 (SEQ ID NO: 682):

[2591] 1. An isolated chimeric polypeptide encoding for AA583399_PEA_{—}1_P10 (SEQ ID NO:689), comprising a first amino acid sequence being at least 90% homologous to MFTRQAGHFVEGSKAGRSRGRLCLSQALRVAVRGAFVSLWFAAGAGDRERNKGDKG AQTGAGLSQEAEDVDVSRARRVTDAPQGTLCGTGNRNSGSQSARAVGVAHLGEAFRV GVEQAISSCPEEVHGRHGLSMEIMWAQMDVALRSPGRGLLAGAGALCMTLAESSCPD YERGRRACLTLHRHPTPHCSTWGLPLRVAGSWLTVVTVEALGRWRMGVRRTGQVGPT MHPPPVSGASPLLLHHLLLLLLIIILTC corresponding to amino acids 59-313 of MYEO_HUMAN_V3 (SEQ ID NO:682), which also corresponds to amino acids 1-255 of AA583399_PEA_{—}1_P10 (SEQ ID NO:689).

[2592] It should be noted that the known protein sequence (MYEO_HUMAN (SEQ ID NO:679)) has one or more changes than the sequence given at the end of the application and named as being the amino acid sequence for MYEO_HUMAN_V3 (SEQ ID NO:682). These changes were previously known to occur and are listed in the table below.

[2593] The location of the variant protein was determined according to results from a number of different software programs and analyses, including analyses from SignalP and other specialized programs. The variant protein is believed to be located as follows with regard to the cell: secreted. The protein localization is believed to be secreted because one of the two signal-peptide prediction programs (HMM:Signal peptide,NN:NO) predicts that this protein has a signal peptide.

[2594] Variant protein AA583399_PEA_{—}1_P10 (SEQ ID NO:689) also has the following non-silent SNPs (Single Nucleotide Polymorphisms) as listed in Table 19, (given according to their position(s) on the amino acid sequence, with the alternative amino acid(s) listed; the last column indicates whether the SNP is known or not; the presence of known SNPs in variant protein AA583399_PEA_{—}1_P10 (SEQ ID NO:689) sequence provides support for the deduced sequence of this variant protein according to the present invention).

[2595] Variant protein AA583399_PEA_{—}1_P10 (SEQ ID NO:689) is encoded by the following transcript(s): AA583399_PEA_{—}1_T0 (SEQ ID NO:643), for which the sequence(s) is/are given at the end of the application. The coding portion of transcript AA583399_PEA_{—}1_T0 (SEQ ID NO:643) is shown in bold; this coding portion starts at position 857 and ends at position 1621. The transcript also has the following SNPs as listed in Table 20 (given according to their position on the nucleotide sequence, with the alternative nucleic acid listed; the last column indicates whether the SNP is known or not; the presence of known SNPs in variant protein AA583399_PEA_{—}1_P10 (SEQ ID NO:689) sequence provides support for the deduced sequence of this variant protein according to the present invention).

[2596] Variant protein AA583399_PEA_{—}1_P11 (SEQ ID NO:690) according to the present invention has an amino acid sequence as given at the end of the application; it is encoded by transcript(s) AA583399_PEA_{—}1_T2 (SEQ ID NO:645). The location of the variant protein was determined according to results from a number of different software programs and analyses, including analyses from SignalP and other specialized programs. The variant protein is believed to be located as follows with regard to the cell: secreted. The protein localization is believed to be secreted because both signal-peptide prediction programs predict that this protein has a signal peptide.

[2597] Variant protein AA583399_PEA_{—}1_P11 (SEQ ID NO:690) also has the following non-silent SNPs (Single Nucleotide Polymorphisms) as listed in Table 21, (given according to their position(s) on the amino acid sequence, with the alternative amino acid(s) listed; the last column indicates whether the SNP is known or not; the presence of known SNPs in variant protein AA583399_PEA_{—}1_P11 (SEQ ID NO:690) sequence provides support for the deduced sequence of this variant protein according to the present invention).

[2598] Variant protein AA583399_PEA_{—}1_P11 (SEQ ID NO:690) is encoded by the following transcript(s): AA583399_PEA_{—}1_T2 (SEQ ID NO:645), for which the sequence(s) is/are given at the end of the application. The coding portion of transcript AA583399_PEA_{—}1_T2 (SEQ ID NO:645) is shown in bold; this coding portion starts at position 493 and ends at position 1431. The transcript also has the following SNPs as listed in Table 22 (given according to their position on the nucleotide sequence, with the alternative nucleic acid listed; the last column indicates whether the SNP is known or not; the presence of known SNPs in variant protein AA583399_PEA_{—}1_P11 (SEQ ID NO:690) sequence provides support for the deduced sequence of this variant protein according to the present invention).

[2599] Variant protein AA583399_PEA_{—}1_P12 (SEQ ID NO:691) according to the present invention has an amino acid sequence as given at the end of the application; it is encoded by transcript(s) AA583399_PEA_{—}1_T10 (SEQ ID NO:653) and AA583399_PEA_{—}1_T11 (SEQ ID NO:654). The location of the variant protein was determined according to results from a number of different software programs and analyses, including analyses from SignalP and other specialized programs. The variant protein is believed to be located as follows with regard to the cell: intracellularly. The protein localization is believed to be intracellularly because neither of the trans-membrane region prediction programs predicted a trans-membrane region for this protein. In addition both signal-peptide prediction programs predict that this protein is a non-secreted protein.

[2600] Variant protein AA583399_PEA_{—}1_P12 (SEQ ID NO:691) is encoded by the following transcript(s): AA583399_PEA_{—}1_T10 (SEQ ID NO:653) and AA583399_PEA_{—}1_T11 (SEQ ID NO:654), for which the sequence(s) is/are given at the end of the application.

[2601] The coding portion of transcript AA583399_PEA_{—}1_T10 (SEQ ID NO:653) is shown in bold; this coding portion starts at position 191 and ends at position 367. The transcript also has the following SNPs as listed in Table 23 (given according to their position on the nucleotide sequence, with the alternative nucleic acid listed; the last column indicates whether the SNP is known or not; the presence of known SNPs in variant protein AA583399_PEA_{—}1_P12 (SEQ ID NO:691) sequence provides support for the deduced sequence of this variant protein according to the present invention).

[2602] The coding portion of transcript AA583399_PEA_{—}1_T11 (SEQ ID NO:654) is shown in bold; this coding portion starts at position 191 and ends at position 367. The transcript also has the following SNPs as listed in Table 24 (given according to their position on the nucleotide sequence, with the alternative nucleic acid listed; the last column indicates whether the SNP is known or not; the presence of known SNPs in variant protein AA583399_PEA_{—}1_P12 (SEQ ID NO:691) sequence provides support for the deduced sequence of this variant protein according to the present invention).

[2603] Variant protein AA583399_PEA_{—}1_P14 (SEQ ID NO:692) according to the present invention has an amino acid sequence as given at the end of the application; it is encoded by transcript(s) AA583399_PEA_{—}1_T15 (SEQ ID NO:656). The location of the variant protein was determined according to results from a number of different software programs and analyses, including analyses from SignalP and other specialized programs. The variant protein is believed to be located as follows with regard to the cell: intracellularly. The protein localization is believed to be intracellularly because neither of the trans-membrane region prediction programs predicted a trans-membrane region for this protein. In addition both signal-peptide prediction programs predict that this protein is a non-secreted protein.

[2604] Variant protein AA583399_PEA_{—}1_P14 (SEQ ID NO:692) is encoded by the following transcript(s): AA583399_PEA_{—}1_T15 (SEQ ID NO:656), for which the sequence(s) is/are given at the end of the application. The coding portion of transcript AA583399_PEA_{—}1_T15 (SEQ ID NO:656) is shown in bold; this coding portion starts at position 43 and ends at position 210.

[2605] As noted above, cluster AA583399 features 20 segment(s), which were listed in Table 2 above and for which the sequence(s) are given at the end of the application. These segment(s) are portions of nucleic acid sequence(s) which are described herein separately because they are of particular interest. A description of each segment according to the present invention is now provided.

[2606] Segment cluster AA583399_PEA_{—}1_node_{—}0 (SEQ ID NO:659) according to the present invention is supported by 24 libraries. The number of libraries was determined as previously described. This segment can be found in the following transcript(s): AA583399_PEA_{—}1_T0 (SEQ ID NO:643), AA583399_PEA_{—}1_T1 (SEQ ID NO:644), AA583399_PEA_{—}1_T2 (SEQ ID NO:645), AA583399_PEA_{—}1_T3 (SEQ ID NO:646), AA583399_PEA_{—}1_T4 (SEQ ID NO:647), AA583399_PEA_{—}1_T5 (SEQ ID NO:648), AA583399_PEA_{—}1_T6 (SEQ ID NO:649), AA583399_PEA_{—}1_T7 (SEQ ID NO:650), AA583399_PEA_{—}1_T8 (SEQ ID NO:651), AA583399_PEA_{—}1_T9 (SEQ ID NO:652), AA583399_PEA_{—}1_T10 (SEQ ID NO:653, AA583399_PEA_{—}1_T11 (SEQ ID NO:654) and AA583399_PEA_{—}1_T17 (SEQ ID NO:658). Table 25 below describes the starting and ending position of this segment on each transcript.

[2607] Segment cluster AA583399_PEA_{—}1_node_{—}3 (SEQ ID NO:660) according to the present invention is supported by 4 libraries. The number of libraries was determined as previously described. This segment can be found in the following transcript(s): AA583399_PEA_{—}1_T4 (SEQ ID NO:647). Table 26 below describes the starting and ending position of this segment on each transcript.

[2608] Segment cluster AA583399_PEA_{—}1_node_{—}9 (SEQ ID NO:661) according to the present invention is supported by 23 libraries. The number of libraries was determined as previously described. This segment can be found in the following transcript(s): AA583399_PEA_{—}1_T0 (SEQ ID NO:643), AA583399_PEA_{—}1_T1 (SEQ ID NO:644), AA583399_PEA_{—}1_T2 (SEQ ID NO:645), AA583399_PEA_{—}1_T3 (SEQ ID NO:646), AA583399_PEA_{—}1_T4 (SEQ ID NO:647), AA583399_PEA_{—}1_T5 (SEQ ID NO:648), AA583399_PEA_{—}1_T6 (SEQ ID NO:649), AA583399_PEA_{—}1_T8 (SEQ ID NO:651) and AA583399_PEA_{—}1_T9 (SEQ ID NO:652). Table 27 below describes the starting and ending position of this segment on each transcript.

[2609] Segment cluster AA583399_PEA_{—}1_node_{—}10 (SEQ ID NO:662) according to the present invention is supported by 59 libraries. The number of libraries was determined as previously described. This segment can be found in the following transcript(s): AA583399_PEA_{—}1_T0 (SEQ ID NO:643), AA583399_PEA_{—}1_T1 (SEQ ID NO:644), AA583399_PEA_{—}1_T2 (SEQ ID NO:645), AA583399_PEA_{—}1_T3 (SEQ ID NO:646), AA583399_PEA_{—}1_T4 (SEQ ID NO:647), AA583399_PEA_{—}1_T5 (SEQ ID NO:648), AA583399_PEA_{—}1_T6 (SEQ ID NO:649), AA583399_PEA_{—}1_T7 (SEQ ID NO:650), AA583399_PEA_{—}1_T8 (SEQ ID NO:651) and AA583399_PEA_{—}1_T9 (SEQ ID NO:652). Table 28 below describes the starting and ending position of this segment on each transcript.

[2610] Segment cluster AA583399_PEA_{—}1_node_{—}12 (SEQ ID NO:663) according to the present invention is supported by 34 libraries. The number of libraries was determined as previously described. This segment can be found in the following transcript(s): AA583399_PEA_{—}1_T0 (SEQ ID NO:643), AA583399_PEA_{—}1_T1 (SEQ ID NO:644), AA583399_PEA_{—}1_T2 (SEQ ID NO:645), AA583399_PEA_{—}1_T3 (SEQ ID NO:646), AA583399_PEA_{—}1_T4 (SEQ ID NO:647), AA583399_PEA_{—}1_T5 (SEQ ID NO:648), AA583399_PEA_{—}1_T6 (SEQ ID NO:649), AA583399_PEA_{—}1_T7 (SEQ ID NO:650), AA583399_PEA_{—}1_T8 (SEQ ID NO:651) and AA583399_PEA_{—}1_T9 (SEQ ID NO:652). Table 29 below describes the starting and ending position of this segment on each transcript.

[2611] Segment cluster AA583399_PEA_{—}1_node_{—}14 (SEQ ID NO:664) according to the present invention is supported by 6 libraries. The number of libraries was determined as previously described. This segment can be found in the following transcript(s): AA583399_PEA_{—}1_T12 (SEQ ID NO:655) and AA583399_PEA_{—}1_T16 (SEQ ID NO:657). Table 30 below describes the starting and ending position of this segment on each transcript.

[2612] Segment cluster AA583399_PEA_{—}1_node_{—}21 (SEQ ID NO:665) according to the present invention is supported by 15 libraries. The number of libraries was determined as previously described. This segment can be found in the following transcript(s): AA583399_PEA_{—}1_T10 (SEQ ID NO:653), AA583399_PEA_{—}1_T11 (SEQ ID NO:654), AA583399_PEA_{—}1_T12 (SEQ ID NO:655), AA583399_PEA_{—}1_T15 (SEQ ID NO:656), AA583399_PEA_{—}1_T16 (SEQ ID NO:657) and AA583399_PEA_{—}1_T17 (SEQ ID NO:658). Table 31 below describes the starting and ending position of this segment on each transcript.

[2613] Segment cluster AA583399_PEA_{—}1_node_{—}24 (SEQ ID NO:666) according to the present invention is supported by 7 libraries. The number of libraries was determined as previously described. This segment can be found in the following transcript(s): AA583399_PEA_{—}1_T11 (SEQ ID NO:654), AA583399_PEA_{—}1_T12 (SEQ ID NO:655), AA583399_PEA_{—}1_T15 (SEQ ID NO:656) and AA583399_PEA_{—}1_T16 (SEQ ID NO:657). Table 32 below describes the starting and ending position of this segment on each transcript.

[2614] Segment cluster AA583399_PEA_{—}1_node_{—}25 (SEQ ID NO:667) according to the present invention is supported by 1 libraries. The number of libraries was determined as previously described. This segment can be found in the following transcript(s): AA583399_PEA_{—}1_T16 (SEQ ID NO:657). Table 33 below describes the starting and ending position of this segment on each transcript.

[2615] Segment cluster AA583399_PEA_{—}1_node_{—}29 (SEQ ID NO:668) according to the present invention is supported by 8 libraries. The number of libraries was determined as previously described. This segment can be found in the following transcript(s): AA583399_PEA_{—}1_T11 (SEQ ID NO:654), AA583399_PEA_{—}1_T12 (SEQ ID NO:655) and AA583399_PEA_{—}1_T15 (SEQ ID NO:656). Table 34 below describes the starting and ending position of this segment on each transcript.

[2616] According to an optional embodiment of the present invention, short segments related to the above cluster are also provided. These segments are up to about 120 bp in length, and so are included in a separate description.

[2617] Segment cluster AA583399_PEA_{—}1_node_{—}1 (SEQ ID NO:669) according to the present invention is supported by 22 libraries. The number of libraries was determined as previously described. This segment can be found in the following transcript(s): AA583399_PEA_{—}1_T0 (SEQ ID NO:643), AA583399_PEA_{—}1_T1 (SEQ ID NO:644), AA583399_PEA_{—}1_T2 (SEQ ID NO:645), AA583399_PEA_{—}1_T3 (SEQ ID NO:646), AA583399_PEA_{—}1_T4 (SEQ ID NO:647), AA583399_PEA_{—}1_T5 (SEQ ID NO:648), AA583399_PEA_{—}1_T6 (SEQ ID NO:649), AA583399_PEA_{—}1_T7 (SEQ ID NO:650), AA583399_PEA_{—}1_T8 (SEQ ID NO:651), AA583399_PEA_{—}1_T9 (SEQ ID NO:652), AA583399_PEA_{—}1_T10 (SEQ ID NO:653) and AA583399_PEA_{—}1_T11 (SEQ ID NO:654). Table 35 below describes the starting and ending position of this segment on each transcript.

[2618] Segment cluster AA583399_PEA_{—}1_node_{—}2 (SEQ ID NO:670) according to the present invention is supported by 24 libraries. The number of libraries was determined as previously described. This segment can be found in the following transcript(s): AA583399_PEA_{—}1_T0 (SEQ ID NO:643), AA583399_PEA_T1 (SEQ ID NO:644), AA583399_PEA_{—}1_T2 (SEQ ID NO:645), AA583399_PEA_{—}1_T3 (SEQ ID NO:646), AA583399_PEA_{—}1_T4 (SEQ ID NO:647), AA583399_PEA_{—}1_T5 (SEQ ID NO:648), AA583399_PEA_{—}1_T6 (SEQ ID NO:649), AA583399_PEA_{—}1_T7 (SEQ ID NO:650), AA583399_PEA_{—}1_T8 (SEQ ID NO:651), AA583399_PEA_{—}1_T9 (SEQ ID NO:652), AA583399_PEA_{—}1_T10 (SEQ ID NO:653), AA583399_PEA_{—}1_T11 (SEQ ID NO:654) and AA583399_PEA_{—}1_T17 (SEQ ID NO:658). Table 36 below describes the starting and ending position of this segment on each transcript.

[2619] Segment cluster AA583399_PEA_{—}1_node_{—}4 (SEQ ID NO:671) according to the present invention is supported by 13 libraries. The number of libraries was determined as previously described. This segment can be found in the following transcript(s): AA583399_PEA_{—}1_T0 (SEQ ID NO:643), AA583399_PEA_{—}1_T1 (SEQ ID NO:644), AA583399_PEA_{—}1_T4 (SEQ ID NO:647), AA583399_PEA_{—}1_T6 (SEQ ID NO:649), AA583399_PEA_{—}1_T7 (SEQ ID NO:650) and AA583399_PEA_{—}1_T9 (SEQ ID NO:652). Table 37 below describes the starting and ending position of this segment on each transcript.

[2620] Segment cluster AA583399_PEA_{—}1_node_{—}5 (SEQ ID NO:672) according to the present invention is supported by 13 libraries. The number of libraries was determined as previously described. This segment can be found in the following transcript(s): AA583399_PEA_{—}1_T0 (SEQ ID NO:643), AA583399_PEA_{—}1_T1 (SEQ ID NO:644), AA583399_PEA_{—}1_T2 (SEQ ID NO:645, AA583399_PEA_{—}1_T4 (SEQ ID NO:647), AA583399_PEA_{—}1_T5 (SEQ ID NO:648), AA583399_PEA_{—}1_T6 (SEQ ID NO:649), AA583399_PEA_{—}1_T7 (SEQ ID NO:650) and AA583399_PEA_{—}1_T9 (SEQ ID NO:652). Table 38 below describes the starting and ending position of this segment on each transcript.

[2621] Segment cluster AA583399_PEA_{—}1_node_{—}6 (SEQ ID NO:673) according to the present invention is supported by 13 libraries. The number of libraries was determined as previously described. This segment can be found in the following transcript(s): AA583399_PEA_{—}1_T0 (SEQ ID NO:643), AA583399_PEA_{—}1_T1 (SEQ ID NO:644), AA583399_PEA_{—}1_T2 (SEQ ID NO:645), AA583399_PEA_{—}1_T3 (SEQ ID NO:646), AA583399_PEA_{—}1_T4 (SEQ ID NO:647), AA583399_PEA_{—}1_T5 (SEQ ID NO:648), AA583399_PEA_{—}1_T6 (SEQ ID NO:649), AA583399_PEA_{—}1_T7 (SEQ ID NO:650) and AA583399_PEA_{—}1_T9 (SEQ ID NO:652). Table 39 below describes the starting and ending position of this segment on each transcript.

[2622] Segment cluster AA583399_PEA_{—}1_node_{—}7 (SEQ ID NO:674) according to the present invention is supported by 9 libraries. The number of libraries was determined as previously described. This segment can be found in the following transcript(s): AA583399_PEA_{—}1_T0 (SEQ ID NO:643), AA583399_PEA_{—}1_T3 (SEQ ID NO:646), AA583399_PEA_{—}1_T4 (SEQ ID NO:647), AA583399_PEA_{—}1_T5 (SEQ ID NO:648) and AA583399_PEA_{—}1_T7 (SEQ ID NO:650). Table 40 below describes the starting and ending position of this segment on each transcript.

[2623] Segment cluster AA583399_PEA_{—}1_node_{—}8 (SEQ ID NO:675) according to the present invention is supported by 13 libraries. The number of libraries was determined as previously described. This segment can be found in the following transcript(s): AA583399_PEA_{—}1_T0 (SEQ ID NO:643), AA583399_PEA_{—}1_T1 (SEQ ID NO:644), AA583399_PEA_{—}1_T2 (SEQ ID NO:645), AA583399_PEA_{—}1_T3 (SEQ ID NO:646), AA583399_PEA_{—}1_T4 (SEQ ID NO:647), AA583399_PEA_{—}1_T5 (SEQ ID NO:648), AA583399_PEA_{—}1_T6 (SEQ ID NO:649), AA583399_PEA_{—}1_T7 (SEQ ID NO:650) and AA583399_PEA_{—}1_T9 (SEQ ID NO:652). Table 41 below describes the starting and ending position of this segment on each transcript.

[2624] Segment cluster AA583399_PEA_{—}1_node_{—}11 (SEQ ID NO:676) according to the present invention can be found in the following transcript(s): AA583399_PEA_{—}1_T0 (SEQ ID NO:643) 5, AA583399_PEA_{—}1_T1 (SEQ ID NO:644), AA583399_PEA_{—}1_T2 (SEQ ID NO:645), AA583399_PEA_{—}1_T3 (SEQ ID NO:646), AA583399_PEA_{—}1_T4 (SEQ ID NO:647), AA583399_PEA_{—}1_T5 (SEQ ID NO:648), AA583399_PEA_{—}1_T6 (SEQ ID NO:649), AA583399_PEA_{—}1_T7 (SEQ ID NO:650) and AA583399_PEA_{—}1_T8 (SEQ ID NO:651). Table 42 below describes the starting and ending position of this segment on each transcript.

[2625] Segment cluster AA583399_PEA_{—}1_node_{—}19 (SEQ ID NO:677) according to the present invention is supported by 1 libraries. The number of libraries was determined as previously described. This segment can be found in the following transcript(s): AA583399_PEA_{—}1_T15 (SEQ ID NO:656). Table 43 below describes the starting and ending position of this segment on each transcript.

[2626] Segment cluster AA583399_PEA_{—}1_node_{—}27 (SEQ ID NO:678) according to the present invention is supported by 4 libraries. The number of libraries was determined as previously described. This segment can be found in the following transcript(s): AA583399_PEA_{—}1_T11 (SEQ ID NO:654), AA583399_PEA_{—}1_T12 (SEQ ID NO:655) and AA583399_PEA_{—}1_T15 (SEQ ID NO:656). Table 44 below describes the starting and ending position of this segment on each transcript.

Variant protein alignment to the previously known protein:

Sequence name: MYEO_HUMAN_V1 (SEQ ID NO:680)

Sequence Documentation:

Alignment of: AA583399_PEA_{—}1_P2 (SEQ ID NO:684)×MYEO_HUMAN_V1 (SEQ ID NO:680) ••

Alignment segment 1/1:

Alignment:

Sequence name: MYEO_HUMAN_V1 (SEQ ID NO:680)

Sequence Documentation:

Alignment of: AA583399_PEA_{—}1_P4 (SEQ ID NO:685)×MYEO_HUMAN_V1 (SEQ ID NO:680) ••

Alignment segment 1/1:

Alignment:

Sequence name: MYEO_HUMAN_V2 (SEQ ID NO:681)

Sequence Documentation:

Alignment of: AA583399_PEA_{—}1_P5 (SEQ ID NO:686)×MYEO_HUMAN_V2 (SEQ ID NO:681) ••

Alignment segment 1/1:

Alignment:

Sequence name: MYEO_HUMAN_V3 (SEQ ID NO:682)

Sequence Documentation:

Alignment of: AA583399_PEA_{—}1_P10 (SEQ ID NO:689) x MYEO_HUMAN_V3 (SEQ ID NO:682) ••

Alignment segment 1/1:

Alignment:

[2627] Expression of myeloma overexpressed gene (in a subset of t(11;14) positive multiple myelomas) (MYEOV) AA583399 transcripts which are detectable by amplicon as depicted in sequence name AA583399seg30-32 (SEQ ID NO:1321) in normal and cancerous colon tissues

[2628] Expression of myeloma overexpressed gene (in a subset of t(11;14) positive multiple myelomas) (MYEOV) transcripts detectable by or according to seg30-32, AA583399seg30-32 amplicon (SEQ ID NO:1321) and AA583399seg30-32F (SEQ ID NO:1319) and AA583399seg30-32R(SEQ ID NO:1320) primers was measured by real time PCR. In parallel the expression of four housekeeping genes—PBGD (GenBank Accession No. BC019323 (SEQ ID NO:1576); amplicon—PBGD-amplicon, SEQ ID NO:531), HPRT1 (GenBank Accession No. NM_{—}000194 (SEQ ID NO:1577); amplicon—HPRT1-amplicon, SEQ ID NO:612), G6PD (GenBank Accession No. NM_{—}000402 (SEQ ID NO:1578); G6PD amplicon, SEQ ID NO:615), RPS27A (GenBank Accession No. NM_{—}002954 (SEQ ID NO:1579); RPS27A amplicon, SEQ ID NO:1261), was measured similarly. For each RT sample, the expression of the above amplicon was normalized to the geometric mean of the quantities of the housekeeping genes. The normalized quantity of each RT sample was then divided by the median of the quantities of the normal post-mortem (PM) samples (Sample Nos. 41, 52, 62-67, 69-71, Table 1, above, “Tissue samples in testing panel”), to obtain a value of fold up-regulation for each sample relative to median of the normal PM samples.

[2629] FIG. 41 is a histogram showing over expression of the above-indicated myeloma overexpressed gene (in a subset of t(11;14) positive multiple myelomas) (MYEOV) transcripts in cancerous colon samples relative to the normal samples. (Values represent the average of duplicate experiments. Error bars indicate the minimal and maximal values obtained.) The number and percentage of samples that exhibit at least 5 fold over-expression, out of the total number of samples tested is indicated in the bottom.

[2630] As is evident from FIG. 41, the expression of myeloma overexpressed gene (in a subset of t(11;14) positive multiple myelomas) (MYEOV) transcripts detectable by the above amplicon in cancer samples was significantly higher than in the non-cancerous samples (Sample Nos. 41, 52, 62-67, 69-71, Table 1, “Tissue samples in testing panel”). Notably an over-expression of at least 5 fold was found in 27 out of 37 adenocarcinoma samples,

[2631] Statistical analysis was applied to verify the significance of these results, as described below.

[2632] The P value for the difference in the expression levels of myeloma overexpressed gene (in a subset of t(11;14) positive multiple myelomas) (MYEOV) transcripts detectable by the above amplicon in colon cancer samples versus the normal tissue samples was determined by T test as 6.50E-05.

[2633] Threshold of 5 fold overexpression was found to differentiate between cancer and normal samples with P value of 1.56E-05 as checked by exact fisher test. The above values demonstrate statistical significance of the results.

[2634] Primer pairs are also optionally and preferably encompassed within the present invention; for example, for the above experiment, the following primer pair was used as a non-limiting illustrative example only of a suitable primer pair: AA583399seg30-23F forward primer (SEQ ID NO:1319); and AA583399seg30-32 Rreverse primer (SEQ ID NO:1320).

[2635] The present invention also preferably encompasses any amplicon obtained through the use of any suitable primer pair; for example, for the above experiment, the following amplicon was obtained as a non-limiting illustrative example only of a suitable amplicon: AA583399seg30-32 (SEQ ID NO:1321).

[2636] Expression of myeloma overexpressed gene (in a subset of t(11;14) positive multiple myelomas) (MYEOV) AA583399 transcripts which are detectable by amplicon as depicted in sequence name AA583399seg17 (SEQ ID NO:1324) in normal and cancerous colon tissues

[2637] Expression of myeloma overexpressed gene (in a subset of t(11;14) positive multiple myelomas) (MYEOV) transcripts detectable by or according to seg 17, AA583399seg17 amplicon (SEQ ID NO:1324) and AA583399seg17F (SEQ ID NO:1322) AA583399seg17R (SEQ ID NO:1323) primers was measured by real time PCR. In parallel the expression of four housekeeping genes—PBGD (GenBank Accession No. BC019323 (SEQ ID NO:1576); amplicon—PBGD-amplicon, SEQ ID NO:531), HPRT1 (GenBank Accession No. NM_{—}000194 (SEQ ID NO:1577); amplicon—HPRT1-amplicon, SEQ ID NO:612), G6PD (GenBank Accession No. NM_{—}000402 (SEQ ID NO:1578); G6PD amplicon, SEQ ID NO:615), RPS27A (GenBank Accession No. NM_{—}002954 (SEQ ID NO:1579); RPS27A amplicon, SEQ ID NO:1261), was measured similarly. For each RT sample, the expression of the above amplicon was normalized to the geometric mean of the quantities of the housekeeping genes. The normalized quantity of each RT sample was then divided by the median of the quantities of the normal post-mortem (PM) samples (Sample Nos. 41, 52, 62-67, 69-71, Table 1, above, “Tissue samples in testing panel”), to obtain a value of fold up-regulation for each sample relative to median of the normal PM samples.

[2638] FIG. 42 is a histogram showing over expression of the above-indicated myeloma overexpressed gene (in a subset of t(11;14) positive multiple myelomas) (MYEOV) transcripts in cancerous colon samples relative to the normal samples. (Values represent the average of duplicate experiments. Error bars indicate the minimal and maximal values obtained.) The number and percentage of samples that exhibit at least 5 fold over-expression, out of the total number of samples tested is indicated in the bottom.

[2639] As is evident from FIG. 42, the expression of myeloma overexpressed gene (in a subset of t(11;14) positive multiple myelomas) (MYEOV) transcripts detectable by the above amplicon in cancer samples was significantly higher than in the non-cancerous samples (Sample Nos. 41, 52, 62-67, 69-71, Table 1, “Tissue samples in testing panel”). Notably an over-expression of at least 5 fold was found in 22 out of 37 adenocarcinoma samples.

[2640] Statistical analysis was applied to verify the significance of these results, as described below.

[2641] The P value for the difference in the expression levels of myeloma overexpressed gene (in a subset of t(11;14) positive multiple myelomas) (MYEOV) transcripts detectable by the above amplicon in colon cancer samples versus the normal tissue samples was determined by T test as 2.37E-04.

[2642] Threshold of 5 fold overexpression was found to differentiate between cancer and normal samples with P value of 3.42E-04 as checked by exact fisher test. The above values demonstrate statistical significance of the results.

[2643] Primer pairs are also optionally and preferably encompassed within the present invention; for example, for the above experiment, the following primer pair was used as a non-limiting illustrative example only of a suitable primer pair: AA583399seg17F forward primer (SEQ ID NO:1322); and AA583399seg17 Rreverse primer (SEQ ID NO:1323).

[2644] The present invention also preferably encompasses any amplicon obtained through the use of any suitable primer pair; for example, for the above experiment, the following amplicon was obtained as a non-limiting illustrative example only of a suitable amplicon: AA583399seg17 (SEQ ID NO:1324).

[2645] Expression of myeloma overexpressed gene (in a subset of t(11;14) positive multiple myelomas) (MYEOV) AA583399 transcripts which are detectable by amplicon as depicted in sequence name AA583399seg1 (SEQ ID NO:1327) in normal and cancerous colon tissues

[2646] Expression of myeloma overexpressed gene (in a subset of t(11;14) positive multiple myelomas) (MYEOV) transcripts detectable by or according to seg1, AA583399seg1 amplicon (SEQ ID NO:1327) and AA583399seg1F(SEQ ID NO:1325) AA583399seg1R (SEQ ID NO: 1326) primers was measured by real time PCR. In parallel the expression of four housekeeping genes—PBGD (GenBank Accession No. BC019323 (SEQ ID NO:1576); amplicon—PBGD-amplicon, SEQ ID NO:531), HPRT1 (GenBank Accession No. NM_{—}000194 (SEQ ID NO:1577); amplicon—HPRT1-amplicon, SEQ ID NO:612), G6PD (GenBank Accession No. NM_{—}000402 (SEQ ID NO:1578); G6PD amplicon, SEQ ID NO:615), RPS27A (GenBank Accession No. NM_{—}002954 (SEQ ID NO:1579); RPS27A amplicon, SEQ ID NO:1261), was measured similarly. For each RT sample, the expression of the above amplicon was normalized to the geometric mean of the quantities of the housekeeping genes. The normalized quantity of each RT sample was then divided by the median of the quantities of the normal post-mortem (PM) samples (Sample Nos. 41, 52, 62-67, 69-71, Table 1, above, “Tissue samples in testing panel”), to obtain a value of fold up-regulation for each sample relative to median of the normal PM samples.

[2647] FIG. 43 is a histogram showing over expression of the above-indicated myeloma overexpressed gene (in a subset of t(11;14) positive multiple myelomas) (MYEOV) transcripts in cancerous colon samples relative to the normal samples. The number and percentage of samples that exhibit at least 5 fold over-expression, out of the total number of samples tested is indicated in the bottom.

[2648] As is evident from FIG. 43, the expression of myeloma overexpressed gene (in a subset of t(11;14) positive multiple myelomas) (MYEOV) transcripts detectable by the above amplicon in cancer samples was significantly higher than in the non-cancerous samples (Sample Nos. 41, 52, 62-67, 69-71, Table 1, “Tissue samples in testing panel”). Notably an over-expression of at least 5 fold was found in 23 out of 37 adenocarcinoma samples.

[2649] Statistical analysis was applied to verify the significance of these results, as described below.

[2650] The P value for the difference in the expression levels of myeloma overexpressed gene (in a subset of t(11;14) positive multiple myelomas) (MYEOV) transcripts detectable by the above amplicon in colon cancer samples versus the normal tissue samples was determined by T test as 1.55E-05.

[2651] Threshold of 5 fold overexpression was found to differentiate between cancer and normal samples with P value of 1.97E-04 as checked by exact fisher test. The above values demonstrate statistical significance of the results.

[2652] Primer pairs are also optionally and preferably encompassed within the present invention; for example, for the above experiment, the following primer pair was used as a non-limiting illustrative example only of a suitable primer pair: AA583399seg1F forward primer (SEQ ID NO:1325); and AA583399seg1 Rreverse primer (SEQ ID NO:1326).

[2653] The present invention also preferably encompasses any amplicon obtained through the use of any suitable primer pair; for example, for the above experiment, the following amplicon was obtained as a non-limiting illustrative example only of a suitable amplicon: AA583399seg1 (SEQ ID NO:1327).

Description for Cluster AI684092

[2654] Cluster AI684092 features 2 transcript(s) and 8 segment(s) of interest, the names for which are given in Tables 1 and 2, respectively, the sequences themselves are given at the end of the application. The selected protein variants are given in table 3.

[2655] Cluster AI684092 can be used as a diagnostic marker according to overexpression of transcripts of this cluster in cancer. Expression of such transcripts in normal tissues is also given according to the previously described methods. The term “number” in the left hand column of the table and the numbers on the y-axis of the figure below refer to weighted expression of ESTs in each category, as “parts per million” (ratio of the expression of ESTs for a particular cluster to the expression of all ESTs in that category, according to parts per million).

[2656] Overall, the following results were obtained as shown with regard to the histograms in FIG. 44 and Table 4. This cluster is overexpressed (at least at a minimum level) in the following pathological conditions: brain malignant tumors, epithelial malignant tumors and a mixture of malignant tumors from different tissues.

[2657] As noted above, cluster AI684092 features 2 transcript(s), which were listed in Table 1 above. A description of each variant protein according to the present invention is now provided.

[2658] Variant protein AI684092_PEA_{—}1_P1 (SEQ ID NO:703) according to the present invention has an amino acid sequence as given at the end of the application; it is encoded by transcript(s) AI684092_PEA_{—}1_T2 (SEQ ID NO:693). The location of the variant protein was determined according to results from a number of different software programs and analyses, including analyses from SignalP and other specialized programs. The variant protein is believed to be located as follows with regard to the cell: intracellularly. The protein localization is believed to be intracellularly because neither of the trans-membrane region prediction programs predicted a trans-membrane region for this protein. In addition both signal-peptide prediction programs predict that this protein is a non-secreted protein.

[2659] Variant protein AI684092_PEA_{—}1_P1 (SEQ ID NO:703) also has the following non-silent SNPs (Single Nucleotide Polymorphisms) as listed in Table 6, (given according to their position(s) on the amino acid sequence, with the alternative amino acid(s) listed; the last column indicates whether the SNP is known or not; the presence of known SNPs in variant protein AI684092_PEA_{—}1_P1 (SEQ ID NO:703) sequence provides support for the deduced sequence of this variant protein according to the present invention).

[2660] Variant protein AI684092_PEA_{—}1_P1 (SEQ ID NO:703) is encoded by the following transcript(s): AI684092_PEA_{—}1_T2 (SEQ ID NO:693), for which the sequence(s) is/are given at the end of the application. The coding portion of transcript AI684092_PEA_{—}1_T2 (SEQ ID NO:693) is shown in bold; this coding portion starts at position 1480 and ends at position 2058. The transcript also has the following SNPs as listed in Table 7 (given according to their position on the nucleotide sequence, with the alternative nucleic acid listed; the last column indicates whether the SNP is known or not; the presence of known SNPs in variant protein AI684092_PEA_{—}1_P1 (SEQ ID NO:703) sequence provides support for the deduced sequence of this variant protein according to the present invention).

[2661] Variant protein AI684092_PEA_{—}1_P3 (SEQ ID NO:704) according to the present invention has an amino acid sequence as given at the end of the application; it is encoded by transcript(s) AI684092_PEA_{—}1_T3 (SEQ ID NO:694). The location of the variant protein was determined according to results from a number of different software programs and analyses, including analyses from SignalP and other specialized programs. The variant protein is believed to be located as follows with regard to the cell: intracellularly. The protein localization is believed to be intracellularly because neither of the trans-membrane region prediction programs predicted a trans-membrane region for this protein. In addition both signal-peptide prediction programs predict that this protein is a non-secreted protein.

[2662] Variant protein AI684092_PEA_{—}1_P3 (SEQ ID NO:704) is encoded by the following transcript(s): AI684092_PEA_{—}1_T3 (SEQ ID NO:694), for which the sequence(s) is/are given at the end of the application. The coding portion of transcript AI684092_PEA_{—}1_T3 (SEQ ID NO:694) is shown in bold; this coding portion starts at position 28 and ends at position 279. The transcript also has the following SNPs as listed in Table 8 (given according to their position on the nucleotide sequence, with the alternative nucleic acid listed; the last column indicates whether the SNP is known or not; the presence of known SNPs in variant protein AI684092_PEA_{—}1_P3 (SEQ ID NO:704) sequence provides support for the deduced sequence of this variant protein according to the present invention).

[2663] As noted above, cluster AI684092 features 8 segment(s), which were listed in Table 2 above and for which the sequence(s) are given at the end of the application. These segment(s) are portions of nucleic acid sequence(s) which are described herein separately because they are of particular interest. A description of each segment according to the present invention is now provided.

[2664] Segment cluster AI684092_PEA_{—}1_node_{—}0 (SEQ ID NO:695) according to the present invention is supported by 5 libraries. The number of libraries was determined as previously described. This segment can be found in the following transcript(s): AI684092_PEA_{—}1_T2 (SEQ ID NO:693) and AI684092_PEA_{—}1_T3 (SEQ ID NO:694). Table 9 below describes the starting and ending position of this segment on each transcript.

[2665] Segment cluster AI684092_PEA_{—}1_node_{—}2 (SEQ ID NO:696) according to the present invention is supported by 5 libraries. The number of libraries was determined as previously described. This segment can be found in the following transcript(s): AI684092_PEA_{—}1_T2 (SEQ ID NO:693) and AI684092_PEA_{—}1_T3 (SEQ ID NO:694). Table 10 below describes the starting and ending position of this segment on each transcript.

[2666] Segment cluster AI684092_PEA_{—}1_node_{—}4 (SEQ ID NO:697) according to the present invention is supported by 7 libraries. The number of libraries was determined as previously described. This segment can be found in the following transcript(s): AI684092_PEA_{—}1_T2 (SEQ ID NO:693) and AI684092_PEA_{—}1_T3 (SEQ ID NO:694). Table 11 below describes the starting and ending position of this segment on each transcript.

[2667] Segment cluster AI684092_PEA_{—}1_node_{—}5 (SEQ ID NO:698) according to the present invention is supported by 7 libraries. The number of libraries was determined as previously described. This segment can be found in the following transcript(s): AI684092_PEA_{—}1_T2 (SEQ ID NO:693) and AI684092_PEA_{—}1_T3 (SEQ ID NO:694). Table 12 below describes the starting and ending position of this segment on each transcript.

[2668] Segment cluster AI684092_PEA_{—}1_node_{—}6 (SEQ ID NO:699) according to the present invention is supported by 7 libraries. The number of libraries was determined as previously described. This segment can be found in the following transcript(s): AI684092_PEA_{—}1_T2 (SEQ ID NO:693) and AI684092_PEA_{—}1_T3 (SEQ ID NO:694). Table 13 below describes the starting and ending position of this segment on each transcript.

[2669] Segment cluster AI684092_PEA_{—}1_node_{—}7 (SEQ ID NO:700) according to the present invention is supported by 9 libraries. The number of libraries was determined as previously described. This segment can be found in the following transcript(s): AI684092_PEA_{—}1_T2 (SEQ ID NO:693) and AI684092_PEA_{—}1_T3 (SEQ ID NO:694). Table 14 below describes the starting and ending position of this segment on each transcript.

[2670] Segment cluster AI684092_PEA_{—}1_node_{—}8 (SEQ ID NO:701) according to the present invention is supported by 10 libraries. The number of libraries was determined as previously described. This segment can be found in the following transcript(s): AI684092_PEA_{—}1_T2 (SEQ ID NO:693). Table 15 below describes the starting and ending position of this segment on each transcript.

[2671] Segment cluster AI684092_PEA_{—}1_node_{—}9 (SEQ ID NO:702) according to the present invention is supported by 9 libraries. The number of libraries was determined as previously described. This segment can be found in the following transcript(s): AI684092_PEA_{—}1_T2 (SEQ ID NO:693) and AI684092_PEA_{—}1_T3 (SEQ ID NO:694). Table 16 below describes the starting and ending position of this segment on each transcript.

### EXAMPLE 1

### Expression of AA5315457 Transcripts which are Detectable by Amplicon as Depicted in Sequence Name AA5315457seg8 (SEQ ID NO:1330) in Normal and Cancerous Colon Tissues

[2672] Expression of AA5315457 transcripts detectable by or according to seg8, AA5315457 seg8 amplicon (SEQ ID NO:1330) and AA5315457F (SEQ ID NO:1328) AA5315457R (SEQ ID NO:1329) primers was measured by real time PCR. In parallel the expression of four housekeeping genes—PBGD (GenBank Accession No. BC019323 (SEQ ID NO:1576); amplicon—PBGD-amplicon, SEQ ID NO:531), HPRT1 (GenBank Accession No. NM_{—}000194 (SEQ ID NO:1577); amplicon—HPRT1-amplicon, SEQ ID NO:612), G6PD (GenBank Accession No. NM_{—}000402 (SEQ ID NO:1578); G6PD amplicon, SEQ ID NO:615), RPS27A (GenBank Accession No. NM_{—}002954 (SEQ ID NO:1579); RPS27A amplicon, SEQ ID NO:1261), was measured similarly. For each RT sample, the expression of the above amplicon was normalized to the geometric mean of the quantities of the housekeeping genes. The normalized quantity of each RT sample was then divided by the median of the quantities of the normal post-mortem (PM) samples (Sample Nos. 41, 52, 62-67, 69-71, Table 1, above, “Tissue samples in testing panel”), to obtain a value of fold up-regulation for each sample relative to median of the normal PM samples.

[2673] FIG. 45 is a histogram showing over expression of the above-indicated AA5315457 transcripts in cancerous colon samples relative to the normal samples. (Values represent the average of duplicate experiments. Error bars indicate the minimal and maximal values obtained.) The number and percentage of samples that exhibit at least 3 fold over-expression, out of the total number of samples tested is indicated in the bottom.

[2674] As is evident from FIG. 45, the expression of AA5315457 transcripts detectable by the above amplicon in cancer samples was significantly higher than in the non-cancerous samples (Sample Nos. 41, 52, 62-67, 69-71, Table 1 above, “Tissue samples in testing panel”). Notably an over-expression of at least 3 fold was found in 10 out of 37 adenocarcinoma samples, Statistical analysis was applied to verify the significance of these results, as described below.

[2675] The P value for the difference in the expression levels of AA5315457 transcripts detectable by the above amplicon in colon cancer samples versus the normal tissue samples was determined by T test as 1.66E-05.

[2676] Threshold of 3 fold overexpression was found to differentiate between cancer and normal samples with P value of 5.33E-02 as checked by exact fisher test. The above values demonstrate statistical significance of the results.

[2677] Primer pairs are also optionally and preferably encompassed within the present invention; for example, for the above experiment, the following primer pair was used as a non-limiting illustrative example only of a suitable primer pair: AA5315457F forward primer (SEQ ID NO:1328); and AA5315457Rreverse primer (SEQ ID NO:1329).

[2678] The present invention also preferably encompasses any amplicon obtained through the use of any suitable primer pair; for example, for the above experiment, the following amplicon was obtained as a non-limiting illustrative example only of a suitable amplicon: AA5315457. Forward primer (SEQ ID NO:1328): CATGGACCCCAGGCAAGTC Reversr primer (SEQ ID NO:1329): CTGTTTAGGGTCGAGGCTGTG Amplicon (SEQ ID NO:1330):

Description for Cluster HUMCACH1A

[2679] Cluster HUMCACH1A features 18 transcript(s) and 67 segment(s) of interest, the names for which are given in Tables 1 and 2, respectively, the sequences themselves are given at the end of the application. The selected protein variants are given in table 3.

[2680] These sequences are variants of the known protein Voltage-dependent L-type calcium channel alpha-1D subunit (SwissProt accession identifier CCAD_HUMAN; known also according to the synonyms Calcium channel, L type, alpha-1 polypeptide, isoform 2), SEQ ID NO: 790, referred to herein as the previously known protein.

[2681] Protein Voltage-dependent L-type calcium channel alpha-1D subunit (SEQ ID NO:790) is known or believed to have the following function(s): Voltage-sensitive calcium channels (VSCC) mediate the entry of calcium ions into excitable cells and are also involved in a variety of calcium-dependent processes, including muscle contraction, hormone or neurotransmitter release, gene expression, cell motility, cell division and cell death. The isoform alpha-1D gives rise to L-type calcium currents. Long-lasting (L-type) calcium channels belong to the “high-voltage activated” (HVA) group. They are blocked by dihydropyridines (DHP), phenylalkylamines, benzothiazepines, and by omega-agatoxin-IIIA (omega-aga-IIIA). They are however insensitive to omega-conotoxin-GVIA (omega-CTx-GVIA) and omega-agatoxin-IVA (omega-aga-IVA). The sequence for protein Voltage-dependent L-type calcium channel alpha-1D subunit (SEQ ID NO:790) is given at the end of the application, as “Voltage-dependent L-type calcium channel alpha-1D subunit (SEQ ID NO:790) amino acid sequence”. Known polymorphisms for this sequence are as shown in Table 4.

[2682] Protein Voltage-dependent L-type calcium channel alpha-1D subunit (SEQ ID NO:790) localization is believed to be Integral membrane protein.

[2683] The following GO Annotation(s) apply to the previously known protein. The following annotation(s) were found: transport; cation transport; calcium ion transport, which are annotation(s) related to Biological Process; calcium binding; dihydropyridine-sensitive calcium channel, which are annotation(s) related to Molecular Function; and voltage-gated calcium channel; integral membrane protein, which are annotation(s) related to Cellular Component.

[2684] The GO assignment relies on information from one or more of the SwissProt/TremB1 Protein knowledgebase, available from <http://www.expasy.ch/sprot/>; or Locuslink, available from <http://www.ncbi.nlm.nih.gov/projects/LocusLink/>.

[2685] Cluster HUMCACH1A can be used as a diagnostic marker according to overexpression of transcripts of this cluster in cancer. Expression of such transcripts in normal tissues is also given according to the previously described methods. The term “number” in the left hand column of the table and the numbers on the y-axis of the figure below refer to weighted expression of ESTs in each category, as “parts per million” (ratio of the expression of ESTs for a particular cluster to the expression of all ESTs in that category, according to parts per million).

[2686] Overall, the following results were obtained as shown with regard to the histograms in FIG. 46 and Table 5. This cluster is overexpressed (at least at a minimum level) in the following pathological conditions: a mixture of malignant tumors from different tissues.

[2687] As noted above, cluster HUMCACH1A features 18 transcript(s), which were listed in Table 1 above. These transcript(s) encode for protein(s) which are variant(s) of protein Voltage-dependent L-type calcium channel alpha-1D subunit (SEQ ID NO:790). A description of each variant protein according to the present invention is now provided.

[2688] Variant protein HUMCACH1A_PEA_{—}1_P2 (SEQ ID NO:792) according to the present invention has an amino acid sequence as given at the end of the application; it is encoded by transcript(s) HUMCACH1A_PEA_{—}1_T0 (SEQ ID NO:705), HUMCACH1A_PEA_{—}1_T1 (SEQ ID NO:706), HUMCACH1A_PEA_{—}1_T2 (SEQ ID NO:707), HUMCACH1A_PEA_{—}1_T3 (SEQ ID NO:708) and HUMCACH1A_PEA_{—}1_T4 (SEQ ID NO:709). The location of the variant protein was determined according to results from a number of different software programs and analyses, including analyses from SignalP and other specialized programs. The variant protein is believed to be located as follows with regard to the cell: membrane. The protein localization is believed to be membrane because both trans-membrane region prediction programs predicted a trans-membrane region for this protein.

[2689] Variant protein HUMCACH1A_PEA_{—}1_P2 (SEQ ID NO:792) also has the following non-silent SNPs (Single Nucleotide Polymorphisms) as listed in Table 7, (given according to their position(s) on the amino acid sequence, with the alternative amino acid(s) listed; the last column indicates whether the SNP is known or not; the presence of known SNPs in variant protein HUMCACH1A_PEA_{—}1_P2 (SEQ ID NO:792) sequence provides support for the deduced sequence of this variant protein according to the present invention).

[2690] Variant protein HUMCACH1A_PEA_{—}1_P2 (SEQ ID NO:792) is encoded by the following transcript(s): HUMCACH1A_PEA_{—}1_T0 (SEQ ID NO:705), HUMCACH1A_PEA_{—}1_T1 (SEQ ID NO:706), HUMCACH1A_PEA_{—}1_T2 (SEQ ID NO:707), HUMCACH1A_PEA_{—}1_T3 (SEQ ID NO:708) and HUMCACH1A_PEA_{—}1_T4 (SEQ ID NO:709), for which the sequence(s) is/are given at the end of the application.

[2691] The coding portion of transcript HUMCACH1A_PEA_{—}1_T0 (SEQ ID NO:705) is shown in bold; this coding portion starts at position 512 and ends at position 7054. The transcript also has the following SNPs as listed in Table 8 (given according to their position on the nucleotide sequence, with the alternative nucleic acid listed; the last column indicates whether the SNP is known or not; the presence of known SNPs in variant protein HUMCACH1A_PEA_{—}1_P2 (SEQ ID NO:792) sequence provides support for the deduced sequence of this variant protein according to the present invention).

[2692] The coding portion of transcript HUMCACH1A_PEA_{—}1_T1 (SEQ ID NO:706) is shown in bold; this coding portion starts at position 89 and ends at position 6631. The transcript also has the following SNPs as listed in Table 9 (given according to their position on the nucleotide sequence, with the alternative nucleic acid listed; the last column indicates whether the SNP is known or not; the presence of known SNPs in variant protein HUMCACH1A_PEA_{—}1_P2 (SEQ ID NO:792) sequence provides support for the deduced sequence of this variant protein according to the present invention).

[2693] The coding portion of transcript HUMCACH1A_PEA_{—}1_T2 (SEQ ID NO:707) is shown in bold; this coding portion starts at position 512 and ends at position 7054. The transcript also has the following SNPs as listed in Table 10 (given according to their position on the nucleotide sequence, with the alternative nucleic acid listed; the last column indicates whether the SNP is known or not; the presence of known SNPs in variant protein HUMCACH1A_PEA_{—}1_P2 (SEQ ID NO:792) sequence provides support for the deduced sequence of this variant protein according to the present invention).

[2694] The coding portion of transcript HUMCACH1A_PEA_{—}1_T3 (SEQ ID NO:708) is shown in bold; this coding portion starts at position 512 and ends at position 7054. The transcript also has the following SNPs as listed in Table 11 (given according to their position on the nucleotide sequence, with the alternative nucleic acid listed; the last column indicates whether the SNP is known or not; the presence of known SNPs in variant protein HUMCACH1A_PEA_{—}1_P2 (SEQ ID NO:792) sequence provides support for the deduced sequence of this variant protein according to the present invention).

[2695] The coding portion of transcript HUMCACH1A_PEA_{—}1_T4 (SEQ ID NO:709) is shown in bold; this coding portion starts at position 512 and ends at position 7054. The transcript also has the following SNPs as listed in Table 12 (given according to their position on the nucleotide sequence, with the alternative nucleic acid listed; the last column indicates whether the SNP is known or not; the presence of known SNPs in variant protein HUMCACH1A_PEA_{—}1_P2 (SEQ ID NO:792) sequence provides support for the deduced sequence of this variant protein according to the present invention).

[2696] Variant protein HUMCACH1A_PEA_{—}1_P3 (SEQ ID NO:793) according to the present invention has an amino acid sequence as given at the end of the application; it is encoded by transcript(s) HUMCACH1A_PEA_{—}1_T6 (SEQ ID NO:710). The location of the variant protein was determined according to results from a number of different software programs and analyses, including analyses from SignalP and other specialized programs. The variant protein is believed to be located as follows with regard to the cell: membrane. The protein localization is believed to be membrane because both trans-membrane region prediction programs predicted a trans-membrane region for this protein.

[2697] Variant protein HUMCACH1A_PEA_{—}1_P3 (SEQ ID NO:793) also has the following non-silent SNPs (Single Nucleotide Polymorphisms) as listed in Table 13, (given according to their position(s) on the amino acid sequence, with the alternative amino acid(s) listed; the last column indicates whether the SNP is known or not; the presence of known SNPs in variant protein HUMCACH1A_PEA_{—}1_P3 (SEQ ID NO:793) sequence provides support for the deduced sequence of this variant protein according to the present invention).

[2698] Variant protein HUMCACH1A_PEA_{—}1_P3 (SEQ ID NO:793) is encoded by the following transcript(s): HUMCACH1A_PEA_{—}1_T6 (SEQ ID NO:710), for which the sequence(s) is/are given at the end of the application. The coding portion of transcript HUMCACH1A_PEA_{—}1_T6 (SEQ ID NO:710) is shown in bold; this coding portion starts at position 512 and ends at position 6157. The transcript also has the following SNPs as listed in Table 14 (given according to their position on the nucleotide sequence, with the alternative nucleic acid listed; the last column indicates whether the SNP is known or not; the presence of known SNPs in variant protein HUMCACH1A_PEA_{—}1_P3 (SEQ ID NO:793) sequence provides support for the deduced sequence of this variant protein according to the present invention).

[2699] Variant protein HUMCACH1A_PEA_{—}1_P4 (SEQ ID NO:794) according to the present invention has an amino acid sequence as given at the end of the application; it is encoded by transcript(s) HUMCACH1A_PEA_{—}1_T7 (SEQ ID NO:711). The location of the variant protein was determined according to results from a number of different software programs and analyses, including analyses from SignalP and other specialized programs. The variant protein is believed to be located as follows with regard to the cell: membrane. The protein localization is believed to be membrane because both trans-membrane region prediction programs predicted a trans-membrane region for this protein.

[2700] Variant protein HUMCACH1A_PEA_{—}1_P4 (SEQ ID NO:794) also has the following non-silent SNPs (Single Nucleotide Polymorphisms) as listed in Table 15, (given according to their position(s) on the amino acid sequence, with the alternative amino acid(s) listed; the last column indicates whether the SNP is known or not; the presence of known SNPs in variant protein HUMCACH1A_PEA_{—}1_P4 (SEQ ID NO:794) sequence provides support for the deduced sequence of this variant protein according to the present invention).

[2701] Variant protein HUMCACH1A_PEA_{—}1_P4 (SEQ ID NO:794) is encoded by the following transcript(s): HUMCACH1A_PEA_{—}1_T7 (SEQ ID NO:711), for which the sequence(s) is/are given at the end of the application. The coding portion of transcript HUMCACH1A_PEA_{—}1_T7 (SEQ ID NO:711) is shown in bold; this coding portion starts at position 512 and ends at position 7027. The transcript also has the following SNPs as listed in Table 16 (given according to their position on the nucleotide sequence, with the alternative nucleic acid listed; the last column indicates whether the SNP is known or not; the presence of known SNPs in variant protein HUMCACH1A_PEA_{—}1_P4 (SEQ ID NO:794) sequence provides support for the deduced sequence of this variant protein according to the present invention).

[2702] Variant protein HUMCACH1A_PEA_{—}1_P5 (SEQ ID NO:795) according to the present invention has an amino acid sequence as given at the end of the application; it is encoded by transcript(s) HUMCACH1A_PEA_{—}1_T8 (SEQ ID NO:712). The location of the variant protein was determined according to results from a number of different software programs and analyses, including analyses from SignalP and other specialized programs. The variant protein is believed to be located as follows with regard to the cell: membrane. The protein localization is believed to be membrane because both trans-membrane region prediction programs predicted a trans-membrane region for this protein.

[2703] Variant protein HUMCACH1A_PEA_{—}1_P5 (SEQ ID NO:795) also has the following non-silent SNPs (Single Nucleotide Polymorphisms) as listed in Table 17, (given according to their position(s) on the amino acid sequence, with the alternative amino acid(s) listed; the last column indicates whether the SNP is known or not; the presence of known SNPs in variant protein HUMCACH1A_PEA_{—}1_P5 (SEQ ID NO:795) sequence provides support for the deduced sequence of this variant protein according to the present invention).

[2704] Variant protein HUMCACH1A_PEA_{—}1_P5 (SEQ ID NO:795) is encoded by the following transcript(s): HUMCACH1A_PEA_{—}1_T8 (SEQ ID NO:712), for which the sequence(s) is/are given at the end of the application. The coding portion of transcript HUMCACH1A_PEA_{—}1_T8 (SEQ ID NO:712) is shown in bold; this coding portion starts at position 512 and ends at position 6994. The transcript also has the following SNPs as listed in Table 18 (given according to their position on the nucleotide sequence, with the alternative nucleic acid listed; the last column indicates whether the SNP is known or not; the presence of known SNPs in variant protein HUMCACH1A_PEA_{—}1_P5 (SEQ ID NO:795) sequence provides support for the deduced sequence of this variant protein according to the present invention).

[2705] Variant protein HUMCACH1A_PEA_{—}1_P7 (SEQ ID NO:796) according to the present invention has an amino acid sequence as given at the end of the application; it is encoded by transcript(s) HUMCACH1A_PEA_{—}1_T12 (SEQ ID NO:713). An alignment is given to the known protein (Voltage-dependent L-type calcium channel alpha-1D subunit (SEQ ID NO:790)) at the end of the application. One or more alignments to one or more previously published protein sequences are given at the end of the application. A brief description of the relationship of the variant protein according to the present invention to each such aligned protein is as follows:

[2706] Comparison report between HUMCACH1A_PEA_{—}1_P7 (SEQ ID NO:796) and CCAD_HUMAN_V3 (SEQ ID NO:791):

[2707] 1. An isolated chimeric polypeptide encoding for HUMCACH1A_PEA_{—}1_P7 (SEQ ID NO:796), comprising a first amino acid sequence being at least 90% homologous to MPTSETESVNTENVSGEGENRGCCGSL corresponding to amino acids 466-492 of CCAD_HUMAN_V3 (SEQ ID NO:791), which also corresponds to amino acids 1-27 of HUMCACH1A_PEA_{—}1_P7 (SEQ ID NO:796), a second amino acid sequence being at least 70%, optionally at least 80%, preferably at least 85%, more preferably at least 90% and most preferably at least 95% homologous to a polypeptide having the sequence WCWWRRRGAAKAGPSGCRRWG (SEQ ID NO:1573) corresponding to amino acids 28-48 of HUMCACH1A_PEA_{—}1_P7 (SEQ ID NO:796), and a third amino acid sequence being at least 90% homologous to QAISKSKLSRRWRRWNRFNRRRCRAAVKSVTFYWLVIVLVFLNTLTISSEHYNQPDWL TQIQDIANKVLLALFTCEMLVKMYSLGLQAYFVSLFNRFDCFVVCGGITETILVELEIMS PLGISVFRCVRLLRIFKVTRHWTSLSNLVASLLNSMKSIASLLLLLFLFIIIFSLLGMQLFG GKFNFDETQTKRSTFDNFPQALLTVFQILTGEDWNAVMYDGIMAYGGPSSSGMIVCIYF IILFICGNYILLNVFLAIAVDNLADAESLNTAQKEEAEEKERKKIARKESLENKKNNKPE VNQIANSDNKVTIDDYREEDEDKDPYPPCDVPVGEEEEEEEEDEPEVPAGPRPRRISELN MKEKIAPIPEGSAFFILSKTNPIRVGCHKLINHHIFTNLILVFIMLSSAALAAEDPIRSHSFR NTILGYFDYAFTAIFTVEILLKMTTFGAFLHKGAFCRNYFNLLDMLVVGVSLVSFGIQSS AISVVKILRVLRVLRPLRAINRAKGLKHVVQCVFVAIRTIGNIMIVTTLLQFMFACIGVQ LFKGKFYRCTDEAKSNPEECRGLFILYKDGDVDSPVVRERIWQNSDFNFDNVLSAMMA LFTVSTFEGWPALLYKAIDSNGENIGPIYNHRVEISIFFIIYIIIVAFFMMNIFVGFVIVTFQE QGEKEYKNCELDKNQRQCVEYALKARPLRRYIPKNPYQYKFWYVVNS SPFEYMMFVL IMLNTLCLAMQHYEQSKMFNDAMDILNMVFTGVFTVEMVLKVIAFKPKGYFSDAWNT FDSLIVIGSIIDVALSEADPTESENVPVPTATPGNSEESNRISITFFRLFRVMRLVKLLSRGE GIRTLLWTFIKSFQALPYVALLIAMLFFIYAVIGMQMFGKVAMRDNNQINNNNFQTFP QAVLLLFRCATGEAWQEIMLACLPGKLCDPESDYNPGEEYTCGSNFAIVYFISFYMLCA FLIINLFVAVIMDNFDYLTRDWSILGPHHLDEFKRIWSEYDPEAKGRIKHLDVVTLLRRI QPPLGFGKLCPHRVACKRLVAMNMPLNSDGTVMFNATLFALVRTALKIKTEGNLEQA NEELRAVIKKIWKKTSMKLLDQVVPPAGDDEVTVGKFYATFLIQDYFRKFKKRKEQGL VGKYPAKNTTIALQAGLRTLHDIGPEIRRAISCDLQDDEPEETKREEEDDVFKRNGALLG NHVNHVNSDRRDSLQQTNTTHRPLHVQRPSIPPASDTEKPLFPPAGNSVCHNHHNHNSI GKQVPTSTNANLNNANMSKAAHGKRPSIGNLEHVSENGHHSSHKHDREPQRRSSVKRT RYYETYIRSDSGDEQLPTICREDPEIHGYFRDPHCLGEQEYFSSEECYEDDSSPTWSRQN YGYYSRYPGRNIDSERPRGYHHPQGFLEDDDSPVCYDSRRSPRRRLLPPTPASHRRSSFN FECLRRQSSQEEVPSSPIFPHRTALPLHLMQQQIMAVAGLDSSKAQKYSPSHSTRSWATP PATPPYRDWTPCYTPLIQVEQSEALDQVNGSLPSLHRSSWYTDEPDISYRTFTPASLTVP SSFRNKNSDKQRSADSLVEAVLISEGLGRYARDPKFVSATKHEIADACDLTIDEMESAA STLLNGNVRPRANGDVGPLSHRQDYELQDFGPGYSDEEPDPGRDEEDLADEMICITTL corresponding to amino acids 494-2161 of CCAD_HUMAN_V3 (SEQ ID NO:791), which also corresponds to amino acids 49-1716 of HUMCACH1A_PEA_{—}1_P7 (SEQ ID NO:796), wherein said first amino acid sequence, second amino acid sequence and third amino acid sequence are contiguous and in a sequential order.

[2708] 2. An isolated polypeptide encoding for an edge portion of HUMCACH1A_PEA_{—}1_P7 (SEQ ID NO:796), comprising an amino acid sequence being at least 70%, optionally at least about 80%, preferably at least about 85%, more preferably at least about 90% and most preferably at least about 95% homologous to the sequence encoding for WCWWRRRGAAKAGPSGCRRWG (SEQ ID NO:1573), corresponding to HUMCACH1A_PEA_{—}1_P7 (SEQ ID NO:796).

[2709] 3. A bridge portion of HUMCACH1A_PEA_{—}1_P7 (SEQ ID NO:796), comprising a polypeptide having a length “n”, wherein n is at least about 10 amino acids in length, optionally at least about 20 amino acids in length, preferably at least about 30 amino acids in length, more preferably at least about 40 amino acids in length and most preferably at least about 50 amino acids in length, wherein at least two amino acids comprise L, having a structure as follows (numbering according to HUMCACH1A_PEA_{—}1_P7 (SEQ ID NO:796)): a sequence starting from any of amino acid numbers 492−x to 492; and ending at any of amino acid numbers 28+((n−2)−x), in which x varies from 0 to n−2.

[2710] It should be noted that the known protein sequence (CCAD_HUMAN (SEQ ID NO:790)) has one or more changes than the sequence given at the end of the application and named as being the amino acid sequence for CCAD_HUMAN_V3 (SEQ ID NO:791). These changes were previously known to occur and are listed in the table below.

[2711] The location of the variant protein was determined according to results from a number of different software programs and analyses, including analyses from SignalP and other specialized programs. The variant protein is believed to be located as follows with regard to the cell: membrane. The protein localization is believed to be membrane because both trans-membrane region prediction programs predicted a trans-membrane region for this protein.

[2712] Variant protein HUMCACH1A_PEA_{—}1_P7 (SEQ ID NO:796) also has the following non-silent SNPs (Single Nucleotide Polymorphisms) as listed in Table 20, (given according to their position(s) on the amino acid sequence, with the alternative amino acid(s) listed; the last column indicates whether the SNP is known or not; the presence of known SNPs in variant protein HUMCACH1A_PEA_{—}1_P7 (SEQ ID NO:796) sequence provides support for the deduced sequence of this variant protein according to the present invention).

[2713] Variant protein HUMCACH1A_PEA_{—}1_P7 (SEQ ID NO:796) is encoded by the following transcript(s): HUMCACH1A_PEA_{—}1_T12 (SEQ ID NO:713), for which the sequence(s) is/are given at the end of the application. The coding portion of transcript HUMCACH1A_PEA_{—}1_T12 (SEQ ID NO:713) is shown in bold; this coding portion starts at position 240 and ends at position 5387. The transcript also has the following SNPs as listed in Table 21 (given according to their position on the nucleotide sequence, with the alternative nucleic acid listed; the last column indicates whether the SNP is known or not; the presence of known SNPs in variant protein HUMCACH1A_PEA_{—}1_P7 (SEQ ID NO:796) sequence provides support for the deduced sequence of this variant protein according to the present invention).

[2714] Variant protein HUMCACH1A_PEA_{—}1_P8 (SEQ ID NO:797) according to the present invention has an amino acid sequence as given at the end of the application; it is encoded by transcript(s) HUMCACH1A_PEA_{—}1_T13 (SEQ ID NO:714). The location of the variant protein was determined according to results from a number of different software programs and analyses, including analyses from SignalP and other specialized programs. The variant protein is believed to be located as follows with regard to the cell: membrane. The protein localization is believed to be membrane because both trans-membrane region prediction programs predicted a trans-membrane region for this protein.

[2715] Variant protein HUMCACH1A_PEA_{—}1_P8 (SEQ ID NO:797) also has the following non-silent SNPs (Single Nucleotide Polymorphisms) as listed in Table 22, (given according to their position(s) on the amino acid sequence, with the alternative amino acid(s) listed; the last column indicates whether the SNP is known or not; the presence of known SNPs in variant protein HUMCACH1A_PEA_{—}1_P8 (SEQ ID NO:797) sequence provides support for the deduced sequence of this variant protein according to the present invention).

[2716] Variant protein HUMCACH1A_PEA_{—}1_P8 (SEQ ID NO:797) is encoded by the following transcript(s): HUMCACH1A_PEA_{—}1_T13 (SEQ ID NO:714), for which the sequence(s) is/are given at the end of the application. The coding portion of transcript HUMCACH1A_PEA_{—}1_T13 (SEQ ID NO:714) is shown in bold; this coding portion starts at position 512 and ends at position 88889. The transcript also has the following SNPs as listed in Table 23 (given according to their position on the nucleotide sequence, with the alternative nucleic acid listed; the last column indicates whether the SNP is known or not; the presence of known SNPs in variant protein HUMCACH1A_PEA_{—}1_P8 (SEQ ID NO:797) sequence provides support for the deduced sequence of this variant protein according to the present invention).

[2717] Variant protein HUMCACH1A_PEA_{—}1_P9 (SEQ ID NO:798) according to the present invention has an amino acid sequence as given at the end of the application; it is encoded by transcript(s) HUMCACH1A_PEA_{—}1_T14 (SEQ ID NO:715). The location of the variant protein was determined according to results from a number of different software programs and analyses, including analyses from SignalP and other specialized programs. The variant protein is believed to be located as follows with regard to the cell: membrane. The protein localization is believed to be membrane because both trans-membrane region prediction programs predicted a trans-membrane region for this protein.

[2718] Variant protein HUMCACH1A_PEA_{—}1_P9 (SEQ ID NO:798) also has the following non-silent SNPs (Single Nucleotide Polymorphisms) as listed in Table 24, (given according to their position(s) on the amino acid sequence, with the alternative amino acid(s) listed; the last column indicates whether the SNP is known or not; the presence of known SNPs in variant protein HUMCACH1A_PEA_{—}1_P9 (SEQ ID NO:798) sequence provides support for the deduced sequence of this variant protein according to the present invention).

[2719] Variant protein HUMCACH1A_PEA_{—}1_P9 (SEQ ID NO:798) is encoded by the following transcript(s): HUMCACH1A_PEA_{—}1_T14 (SEQ ID NO:715), for which the sequence(s) is/are given at the end of the application. The coding portion of transcript HUMCACH1A_PEA_{—}1_T14 (SEQ ID NO:715) is shown in bold; this coding portion starts at position 512 and ends at position 5386. The transcript also has the following SNPs as listed in Table 25 (given according to their position on the nucleotide sequence, with the alternative nucleic acid listed; the last column indicates whether the SNP is known or not; the presence of known SNPs in variant protein HUMCACH1A_PEA_{—}1_P9 (SEQ ID NO:798) sequence provides support for the deduced sequence of this variant protein according to the present invention).

[2720] Variant protein HUMCACH1A_PEA_{—}1_P10 (SEQ ID NO:799) according to the present invention has an amino acid sequence as given at the end of the application; it is encoded by transcript(s) HUMCACH1A_PEA_{—}1_T15 (SEQ ID NO:716). The location of the variant protein was determined according to results from a number of different software programs and analyses, including analyses from SignalP and other specialized programs. The variant protein is believed to be located as follows with regard to the cell: membrane. The protein localization is believed to be membrane because both trans-membrane region prediction programs predicted a trans-membrane region for this protein.

[2721] Variant protein HUMCACH1A_PEA_{—}1_P10 (SEQ ID NO:799) also has the following non-silent SNPs (Single Nucleotide Polymorphisms) as listed in Table 26, (given according to their position(s) on the amino acid sequence, with the alternative amino acid(s) listed; the last column indicates whether the SNP is known or not; the presence of known SNPs in variant protein HUMCACH1A_PEA_{—}1_P10 (SEQ ID NO:799) sequence provides support for the deduced sequence of this variant protein according to the present invention).

[2722] Variant protein HUMCACH1A_PEA_{—}1_P10 (SEQ ID NO:799) is encoded by the following transcript(s): HUMCACH1A_PEA_{—}1_T15 (SEQ ID NO:716), for which the sequence(s) is/are given at the end of the application. The coding portion of transcript HUMCACH1A_PEA_{—}1_T15 (SEQ ID NO:716) is shown in bold; this coding portion starts at position 512 and ends at position 88889. The transcript also has the following SNPs as listed in Table 27 (given according to their position on the nucleotide sequence, with the alternative nucleic acid listed; the last column indicates whether the SNP is known or not; the presence of known SNPs in variant protein HUMCACH1A_PEA_{—}1_P10 (SEQ ID NO:799) sequence provides support for the deduced sequence of this variant protein according to the present invention).

[2723] Variant protein HUMCACH1A_PEA_{—}1_P11 (SEQ ID NO:800) according to the present invention has an amino acid sequence as given at the end of the application; it is encoded by transcript(s) HUMCACH1A_PEA_{—}1_T16 (SEQ ID NO:717). The location of the variant protein was determined according to results from a number of different software programs and analyses, including analyses from SignalP and other specialized programs. The variant protein is believed to be located as follows with regard to the cell: membrane. The protein localization is believed to be membrane because both trans-membrane region prediction programs predicted a trans-membrane region for this protein.

[2724] Variant protein HUMCACH1A_PEA_{—}1_P11 (SEQ ID NO:800) also has the following non-silent SNPs (Single Nucleotide Polymorphisms) as listed in Table 28, (given according to their position(s) on the amino acid sequence, with the alternative amino acid(s) listed; the last column indicates whether the SNP is known or not; the presence of known SNPs in variant protein HUMCACH1A_PEA_{—}1_P11 (SEQ ID NO:800) sequence provides support for the deduced sequence of this variant protein according to the present invention).

[2725] Variant protein HUMCACH1A_PEA_{—}1_P11 (SEQ ID NO:800) is encoded by the following transcript(s): HUMCACH1A_PEA_{—}1_T16 (SEQ ID NO:717), for which the sequence(s) is/are given at the end of the application. The coding portion of transcript HUMCACH1A_PEA_{—}1_T16 (SEQ ID NO:717) is shown in bold; this coding portion starts at position 512 and ends at position 88889. The transcript also has the following SNPs as listed in Table 29 (given according to their position on the nucleotide sequence, with the alternative nucleic acid listed; the last column indicates whether the SNP is known or not; the presence of known SNPs in variant protein HUMCACH1A_PEA_{—}1_P11 (SEQ ID NO:800) sequence provides support for the deduced sequence of this variant protein according to the present invention).

[2726] Variant protein HUMCACH1A_PEA_{—}1_P12 (SEQ ID NO:801) according to the present invention has an amino acid sequence as given at the end of the application; it is encoded by transcript(s) HUMCACH1A_PEA_{—}1_T17 (SEQ ID NO:718). The location of the variant protein was determined according to results from a number of different software programs and analyses, including analyses from SignalP and other specialized programs. The variant protein is believed to be located as follows with regard to the cell: membrane. The protein localization is believed to be membrane because both trans-membrane region prediction programs predicted a trans-membrane region for this protein.

[2727] Variant protein HUMCACH1A_PEA_{—}1_P12 (SEQ ID NO:801) is encoded by the following transcript(s): HUMCACH1A_PEA_{—}1_T17 (SEQ ID NO:718), for which the sequence(s) is/are given at the end of the application. The coding portion of transcript HUMCACH1A_PEA_{—}1_T17 (SEQ ID NO:718) is shown in bold; this coding portion starts at position 1 and ends at position 2644. The transcript also has the following SNPs as listed in Table 30 (given according to their position on the nucleotide sequence, with the alternative nucleic acid listed; the last column indicates whether the SNP is known or not; the presence of known SNPs in variant protein HUMCACH1A_PEA_{—}1_P12 (SEQ ID NO:801) sequence provides support for the deduced sequence of this variant protein according to the present invention).

[2728] Variant protein HUMCACH1A_PEA_{—}1_P13 (SEQ ID NO:802) according to the present invention has an amino acid sequence as given at the end of the application; it is encoded by transcript(s) HUMCACH1A_PEA_{—}1_T18 (SEQ ID NO:719). An alignment is given to the known protein (Voltage-dependent L-type calcium channel alpha-1D subunit (SEQ ID NO:790)) at the end of the application. One or more alignments to one or more previously published protein sequences are given at the end of the application. A brief description of the relationship of the variant protein according to the present invention to each such aligned protein is as follows:

[2729] Comparison report between HUMCACH1A_PEA_{—}1_P13 (SEQ ID NO:802) and CCAD_HUMAN (SEQ ID NO:790):

[2730] 1. An isolated chimeric polypeptide encoding for HUMCACH1A_PEA_{—}1_P13 (SEQ ID NO:802), comprising a first amino acid sequence being at least 70%, optionally at least 80%, preferably at least 85%, more preferably at least 90% and most preferably at least 95% homologous to a polypeptide having the sequence MLRPRCLLRRTAHPPHSAPAPAPARSKCLGSWSNVLIRESSVWSLRL (SEQ ID NO:1477) corresponding to amino acids 1-47 of HUMCACH1A_PEA_{—}1_P13 (SEQ ID NO:802), and a second amino acid sequence being at least 90% homologous to DDEVTVGKFYATFLIQDYFRKFKKRKEQGLVGKYPAKNTTIALQAGLRTLHDIGPEIRR AISCDLQDDEPEETKREEEDDVFKRNGALLGNHVNHVNSDRRDSLQQTNTTHRPLHVQ RPSIPPASDTEKPLFPPAGNSVCHNHHNHNSIGKQVPTSTNANLNNANMSKAAHGKRPS IGNLEHVSENGHHSSHKHDREPQRRSSVKRTRYYETYIRSDSGDEQLPTICREDPEIHGY FRDPHCLGEQEYFSSEECYEDDSSPTWSRQNYGYYSRYPGRNIDSERPRGYHHPQGFLE DDDSPVCYDSRRSPRRRLLPPTPASHRRSSFNFECLRRQSSQEEVPSSPIFPHRTALPLHL MQQQIMAVAGLDSSKAQKYSPSHSTRSWATPPATPPYRDWTPCYTPLIQVEQSEALDQ VNGSLPSLHRSSWYTDEPDISYRTFTPASLTVPSSFRNKNSDKQRSADSLVEAVLISEGL GRYARDPKFVSATKHEIADACDLTIDEMESAASTLLNGNVRPRANGDVGPLSHRQDYE LQDFGPGYSDEEPDPGRDEEDLADEMICITTL corresponding to amino acids 1598-2161 of CCAD_HUMAN (SEQ ID NO:790), which also corresponds to amino acids 48-611 of HUMCACH1A_PEA_{—}1_P13 (SEQ ID NO:802), wherein said first amino acid sequence and second amino acid sequence are contiguous and in a sequential order.

[2731] 2. An isolated polypeptide encoding for a head of HUMCACH1A_PEA_{—}1_P13 (SEQ ID NO:802), comprising a polypeptide being at least 70%, optionally at least about 80%, preferably at least about 85%, more preferably at least about 90% and most preferably at least about 95% homologous to the sequence MLRPRCLLRRTAHPPHSAPAPAPARSKCLGSWSNVLIRESSVWSLRL (SEQ ID NO:1477) of HUMCACH1A_PEA_P13 (SEQ ID NO:802).

[2732] The location of the variant protein was determined according to results from a number of different software programs and analyses, including analyses from SignalP and other specialized programs. The variant protein is believed to be located as follows with regard to the cell: intracellularly. The protein localization is believed to be intracellularly because neither of the trans-membrane region prediction programs predicted a trans-membrane region for this protein. In addition both signal-peptide prediction programs predict that this protein is a non-secreted protein.

[2733] The glycosylation sites of variant protein HUMCACH1A_PEA_{—}1_P13 (SEQ ID NO:802), as compared to the known protein Voltage-dependent L-type calcium channel alpha-1D subunit (SEQ ID NO:790), are described in Table 31 (given according to their position(s) on the amino acid sequence in the first column; the second column indicates whether the glycosylation site is present in the variant protein; and the last column indicates whether the position is different on the variant protein).

[2734] The phosphorilation sites of variant protein HUMCACH1A_PEA_{—}1_P13 (SEQ ID NO:802), as compared to the known protein Voltage-dependent L-type calcium channel alpha-1D subunit (SEQ ID NO:790), are described in Table 32 (given according to their position(s) on the amino acid sequence in the first column; the second column indicates whether the phosphorilation site is present in the variant protein; and the last column indicates whether the position is different on the variant protein).

[2735] Variant protein HUMCACH1A_PEA_{—}1_P13 (SEQ ID NO:802) is encoded by the following transcript(s): HUMCACH1A_PEA_{—}1_T18 (SEQ ID NO:719), for which the sequence(s) is/are given at the end of the application. The coding portion of transcript HUMCACH1A_PEA_{—}1_T18 (SEQ ID NO:719) is shown in bold; this coding portion starts at position 63 and ends at position 1895. The transcript also has the following SNPs as listed in Table 33 (given according to their position on the nucleotide sequence, with the alternative nucleic acid listed; the last column indicates whether the SNP is known or not; the presence of known SNPs in variant protein HUMCACH1A_PEA_{—}1_P13 (SEQ ID NO:802) sequence provides support for the deduced sequence of this variant protein according to the present invention).

[2736] Variant protein HUMCACH1A_PEA_{—}1_P14 (SEQ ID NO:803) according to the present invention has an amino acid sequence as given at the end of the application; it is encoded by transcript(s) HUMCACH1A_PEA_{—}1_T19 (SEQ ID NO:720). An alignment is given to the known protein (Voltage-dependent L-type calcium channel alpha-1D subunit (SEQ ID NO:790)) at the end of the application. One or more alignments to one or more previously published protein sequences are given at the end of the application. A brief description of the relationship of the variant protein according to the present invention to each such aligned protein is as follows:

[2737] Comparison report between HUMCACH1A_PEA_{—}1_P14 (SEQ ID NO:803) and CCAD_HUMAN (SEQ ID NO:790):

[2738] 1. An isolated chimeric polypeptide encoding for HUMCACH1A_PEA_{—}1_P14 (SEQ ID NO:803), comprising a first amino acid sequence being at least 90% homologous to MSKAAHGKRPSIGNLEHVSENGHHSSHKHDREPQRRSSVKRTRYYETYIRSDSGDEQLP TICREDPEIHGYFRDPHCLGEQEYFSSEECYEDDSSPTWSRQNYGYYSRYPGRNIDSERP RGYHHPQGFLEDDDSPVCYDSRRSPRRRLLPPTPASHRRSSFNFECLRRQSSQEEVPSSPI FPHRTALPLHLMQQQIMAVAGLDSSKAQKYSPSHSTRSWATPPATPPYRDWTPCYTPLI QVEQSEALDQVNGSLPSLHRSSWYTDEPDISYRTFTPASLTVPSSFRNKNSDKQRSADSL VEAVLISEGLGRYARDPKFVSATKHEIADACDLTIDEMESAASTLLNGNVRPRANGDVG PLSHRQDYELQDFGPGYSDEEPDPGRDEEDLADEMICITTL corresponding to amino acids 1763-2161 of CCAD_HUMAN (SEQ ID NO:790), which also corresponds to amino acids 1-399 of HUMCACH1A_PEA_{—}1_P14 (SEQ ID NO:803).

[2739] The location of the variant protein was determined according to results from a number of different software programs and analyses, including analyses from SignalP and other specialized programs. The variant protein is believed to be located as follows with regard to the cell: intracellularly. The protein localization is believed to be intracellularly because neither of the trans-membrane region prediction programs predicted a trans-membrane region for this protein. In addition both signal-peptide prediction programs predict that this protein is a non-secreted protein.

[2740] The glycosylation sites of variant protein HUMCACH1A_PEA_{—}1_P14 (SEQ ID NO:803) as compared to the known protein Voltage-dependent L-type calcium channel alpha-1D subunit (SEQ ID NO:790), are described in Table 34 (given according to their position(s) on the amino acid sequence in the first column; the second column indicates whether the glycosylation site is present in the variant protein; and the last column indicates whether the position is different on the variant protein).

[2741] The phosphorilation sites of variant protein HUMCACH1A_PEA_{—}1_P14 (SEQ ID NO:803), as compared to the known protein Voltage-dependent L-type calcium channel alpha-1D subunit (SEQ ID NO:790), are described in Table 35 (given according to their position(s) on the amino acid sequence in the first column; the second column indicates whether the phosphorilation site is present in the variant protein; and the last column indicates whether the position is different on the variant protein).

[2742] Variant protein HUMCACH1A_PEA_{—}1_P14 (SEQ ID NO:803) is encoded by the following transcript(s): HUMCACH1A_PEA_{—}1_T19 (SEQ ID NO:720), for which the sequence(s) is/are given at the end of the application. The coding portion of transcript HUMCACH1A_PEA_{—}1_T19 (SEQ ID NO:720) is shown in bold; this coding portion starts at position 1820 and ends at position 3016. The transcript also has the following SNPs as listed in Table 36 (given according to their position on the nucleotide sequence, with the alternative nucleic acid listed; the last column indicates whether the SNP is known or not; the presence of known SNPs in variant protein HUMCACH1A_PEA_{—}1_P14 (SEQ ID NO:803) sequence provides support for the deduced sequence of this variant protein according to the present invention).

[2743] Variant protein HUMCACH1A_PEA_{—}1_P15 (SEQ ID NO:804) according to the present invention has an amino acid sequence as given at the end of the application; it is encoded by transcript(s) HUMCACH1A_PEA_{—}1_T20 (SEQ ID NO:721). The location of the variant protein was determined according to results from a number of different software programs and analyses, including analyses from SignalP and other specialized programs. The variant protein is believed to be located as follows with regard to the cell: membrane. The protein localization is believed to be membrane because both trans-membrane region prediction programs predicted a trans-membrane region for this protein.

[2744] Variant protein HUMCACH1A_PEA_{—}1_P15 (SEQ ID NO:804) is encoded by the following transcript(s): HUMCACH1A_PEA_{—}1_T20 (SEQ ID NO:721), for which the sequence(s) is/are given at the end of the application. The coding portion of transcript HUMCACH1A_PEA_{—}1_T20 (SEQ ID NO:721) is shown in bold; this coding portion starts at position 512 and ends at position 1732. The transcript also has the following SNPs as listed in Table 37 (given according to their position on the nucleotide sequence, with the alternative nucleic acid listed; the last column indicates whether the SNP is known or not; the presence of known SNPs in variant protein HUMCACH1A_PEA_{—}1_P15 (SEQ ID NO:804) sequence provides support for the deduced sequence of this variant protein according to the present invention).

[2745] Variant protein HUMCACH1A_PEA_{—}1_P17 (SEQ ID NO:805) according to the present invention has an amino acid sequence as given at the end of the application; it is encoded by transcript(s) HUMCACH1A_PEA_{—}1_T22 (SEQ ID NO:722). An alignment is given to the known protein (Voltage-dependent L-type calcium channel alpha-1D subunit (SEQ ID NO:790)) at the end of the application. One or more alignments to one or more previously published protein sequences are given at the end of the application. A brief description of the relationship of the variant protein according to the present invention to each such aligned protein is as follows:

[2746] Comparison report between HUMCACH1A_PEA_{—}1_P17 (SEQ ID NO:805) and CCAD_HUMAN (SEQ ID NO:790):

[2747] 1. An isolated chimeric polypeptide encoding for HUMCACH1A_PEA_{—}1_P17 (SEQ ID NO:805), comprising a first amino acid sequence being at least 90% homologous to MMMMMMMKKMQHQRQQQADHANEANYARGTRLPLSGEGPTSQPNSSKQTVLSWQ AAIDAARQAKAAQTMSTSAPPPVGSLSQRKRQQYAKSKKQGNSSNSRPARALFCLSLN NPIRRACISIVEWKPFDIFILLAIFANCVALAIYIPFPEDDSNSTNHNLEKVEYAFLIIFTVET FLKIIAYGLLLHPNAYVRNGWNLLDFVIVIVGLFSVILEQLTKETEGGNHSSGKSGGFDV KALRAFRVLRPLRLVSGVPSLQVVLNSIIKAMVPLLHIALLVLFVIIIYAIIGLELFIGKMH KTCFFADSDIVAEEDPAPCAFSGNGRQCTANGTECRSGWVGPNGGITNFDNFAFAMLT VFQCITMEGWTDVLYWMNDAMGFELPWVYFVSLVIFGSFFVLNLVLGVLSG corresponding to amino acids 1-407 of CCAD_HUMAN (SEQ ID NO:790), which also corresponds to amino acids 1-407 of HUMCACH1A_PEA_{—}1_P17 (SEQ ID NO:805), and a second amino acid sequence being at least 70%, optionally at least 80%, preferably at least 85%, more preferably at least 90% and most preferably at least 95% homologous to a polypeptide having the sequence HGGSRL (SEQ ID NO:1478) corresponding to amino acids 408-413 of HUMCACH1A_PEA_{—}1_P17 (SEQ ID NO:805), wherein said first amino acid sequence and second amino acid sequence are contiguous and in a sequential order.

[2748] 2. An isolated polypeptide encoding for a tail of HUMCACH1A_PEA_{—}1_P17 (SEQ ID NO:805), comprising a polypeptide being at least 70%, optionally at least about 80%, preferably at least about 85%, more preferably at least about 90% and most preferably at least about 95% homologous to the sequence HGGSRL (SEQ ID NO:1478) in HUMCACH1A_PEA_{—}1_P17 (SEQ ID NO:805).

[2749] The location of the variant protein was determined according to results from a number of different software programs and analyses, including analyses from SignalP and other specialized programs. The variant protein is believed to be located as follows with regard to the cell: membrane. The protein localization is believed to be membrane because both trans-membrane region prediction programs predicted a trans-membrane region for this protein.

[2750] Variant protein HUMCACH1A_PEA_{—}1_P17 (SEQ ID NO:805) also has the following non-silent SNPs (Single Nucleotide Polymorphisms) as listed in Table 38, (given according to their position(s) on the amino acid sequence, with the alternative amino acid(s) listed; the last column indicates whether the SNP is known or not; the presence of known SNPs in variant protein HUMCACH1A_PEA_{—}1_P17 (SEQ ID NO:805) sequence provides support for the deduced sequence of this variant protein according to the present invention).

[2751] The glycosylation sites of variant protein HUMCACH1A_PEA_L_P17 (SEQ ID NO:805) as compared to the known protein Voltage-dependent L-type calcium channel alpha-1D subunit (SEQ ID NO:790), are described in Table 39 (given according to their position(s) on the amino acid sequence in the first column; the second column indicates whether the glycosylation site is present in the variant protein; and the last column indicates whether the position is different on the variant protein).

[2752] The phosphorilation sites of variant protein HUMCACH1A_PEA_{—}1_P17 (SEQ ID NO:805), as compared to the known protein Voltage-dependent L-type calcium channel alpha-1D subunit (SEQ ID NO:790), are described in Table 40 (given according to their position(s) on the amino acid sequence in the first column; the second column indicates whether the phosphorilation site is present in the variant protein; and the last column indicates whether the position is different on the variant protein).

[2753] Variant protein HUMCACH1A_PEA_{—}1_P17 (SEQ ID NO:805) is encoded by the following transcript(s): HUMCACH1A_PEA_{—}1_T22 (SEQ ID NO:722), for which the sequence(s) is/are given at the end of the application. The coding portion of transcript HUMCACH1A_PEA_{—}1_T22 (SEQ ID NO:722) is shown in bold; this coding portion starts at position 512 and ends at position 1750. The transcript also has the following SNPs as listed in Table 41 (given according to their position on the nucleotide sequence, with the alternative nucleic acid listed; the last column indicates whether the SNP is known or not; the presence of known SNPs in variant protein HUMCACH1A_PEA_{—}1_P17 (SEQ ID NO:805) sequence provides support for the deduced sequence of this variant protein according to the present invention).

[2754] As noted above, cluster HUMCACH1A features 67 segment(s), which were listed in Table 2 above and for which the sequence(s) are given at the end of the application. These segment(s) are portions of nucleic acid sequence(s) which are described herein separately because they are of particular interest. A description of each segment according to the present invention is now provided.

[2755] Segment cluster HUMCACH1A_PEA_{—}1_node_{—}2 (SEQ ID NO:723) according to the present invention is supported by 1 libraries. The number of libraries was determined as previously described. This segment can be found in the following transcript(s): HUMCACH1A_PEA_{—}1_T0 (SEQ ID NO:705), HUMCACH1A_PEA_{—}1_T2 (SEQ ID NO:707) HUMCACH1A_PEA_{—}1_T3 (SEQ ID NO:708), HUMCACH1A_PEA_{—}1_T4 (SEQ ID NO:709), HUMCACH1A_PEA_{—}1_T6 (SEQ ID NO:710), HUMCACH1A_PEA_{—}1_T7 (SEQ ID NO:711), HUMCACH1A_PEA_{—}1_T8 (SEQ ID NO:712), HUMCACH1A_PEA_{—}1_T13 (SEQ ID NO:714), HUMCACH1A_PEA_{—}1_T14 (SEQ ID NO:715), HUMCACH1A_PEA_{—}1_T15 (SEQ ID NO:716), HUMCACH1A_PEA_{—}1_T16 (SEQ ID NO:717), HUMCACH1A_PEA_{—}1_T20 (SEQ ID NO:721) and HUMCACH1A_PEA_{—}1_T22 (SEQ ID NO:722). Table 42 below describes the starting and ending position of this segment on each transcript.

[2756] Segment cluster HUMCACH1A_PEA_{—}1_node_{—}5 (SEQ ID NO:724) according to the present invention is supported by 3 libraries. The number of libraries was determined as previously described. This segment can be found in the following transcript(s): HUMCACH1A_PEA_{—}1_T0 (SEQ ID NO:705), HUMCACH1A_PEA_{—}1_T1 (SEQ ID NO:706) HUMCACH1A_PEA_{—}1_T2 (SEQ ID NO:707), HUMCACH1A_PEA_{—}1_T3 (SEQ ID NO:708), HUMCACH1A_PEA_{—}1_T4 (SEQ ID NO:709), HUMCACH1A_PEA_{—}1_T6 (SEQ ID NO:710), HUMCACH1A_PEA_{—}1_T7 (SEQ ID NO:711), HUMCACH1A_PEA_{—}1_T8 (SEQ ID NO:712), HUMCACH1A_PEA_{—}1_T13 (SEQ ID NO:714), HUMCACH1A_PEA_{—}1_T14 (SEQ ID NO:715), HUMCACH1A_PEA_{—}1_T15 (SEQ ID NO:716), HUMCACH1A_PEA_{—}1_T16 (SEQ ID NO:717), HUMCACH1A_PEA_{—}1_T20 (SEQ ID NO:721) and HUMCACH1A_PEA_{—}1_T22 (SEQ ID NO:722). Table 43 below describes the starting and ending position of this segment on each transcript.

[2757] Segment cluster HUMCACH1A_PEA_{—}1_node_{—}9 (SEQ ID NO:725) according to the present invention is supported by 0 libraries. The number of libraries was determined as previously described. This segment can be found in the following transcript(s): HUMCACH1A_PEA_{—}1_T0 (SEQ ID NO:705), HUMCACH1A_PEA_{—}1_T1 (SEQ ID NO:706), HUMCACH1A_PEA_{—}1_T2 (SEQ ID NO:707), HUMCACH1A_PEA_{—}1_T3 (SEQ ID NO:708), HUMCACH1A_PEA_{—}1_T4 (SEQ ID NO:709), HUMCACH1A_PEA_{—}1_T6 (SEQ ID NO:710), HUMCACH1A_PEA_{—}1_T7 (SEQ ID NO:711), HUMCACH1A_PEA_{—}1_T8 (SEQ ID NO:712), HUMCACH1A_PEA_{—}1_T13 (SEQ ID NO:714), HUMCACH1A_PEA_{—}1_T14 (SEQ ID NO:715), HUMCACH1A_PEA_{—}1_T15 (SEQ ID NO:716), HUMCACH1A_PEA_{—}1_T16 (SEQ ID NO:717), HUMCACH1A_PEA_{—}1_T20 (SEQ ID NO:721) and HUMCACH1A_PEA_{—}1_T22 (SEQ ID NO:722). Table 44 below describes the starting and ending position of this segment on each transcript.

[2758] Segment cluster HUMCACH1A_PEA_{—}1_node_{—}11 (SEQ ID NO:726) according to the present invention is supported by 4 libraries. The number of libraries was determined as previously described. This segment can be found in the following transcript(s): HUMCACH1A_PEA_{—}1_T0 (SEQ ID NO:705), HUMCACH1A_PEA_{—}1_T1 (SEQ ID NO:706), HUMCACH1A_PEA_{—}1_T2 (SEQ ID NO:707), HUMCACH1A_PEA_{—}1_T3 (SEQ ID NO:708), HUMCACH1A_PEA_{—}1_T4 (SEQ ID NO:709), HUMCACH1A_PEA_{—}1_T6 (SEQ ID NO:710), HUMCACH1A_PEA_{—}1_T7 (SEQ ID NO:711), HUMCACH1A_PEA_{—}1_T8 (SEQ ID NO:712), HUMCACH1A_PEA_{—}1_T13 (SEQ ID NO:714), HUMCACH1A_PEA_T14 (SEQ ID NO:715), HUMCACH1A_PEA_{—}1_T15 (SEQ ID NO:716), HUMCACH1A_PEA_T16 (SEQ ID NO:717), HUMCACH1A_PEA_{—}1_T20 (SEQ ID NO:721) and HUMCACH1A_PEA_{—}1_T22 (SEQ ID NO:722). Table 45 below describes the starting and ending position of this segment on each transcript.

[2759] Segment cluster HUMCACH1A_PEA_{—}1_node_{—}14 (SEQ ID NO:727) according to the present invention is supported by 2 libraries. The number of libraries was determined as previously described. This segment can be found in the following transcript(s): HUMCACH1A_PEA_{—}1_T0 (SEQ ID NO:705), HUMCACH1A_PEA_{—}1_T1 (SEQ ID NO:706), HUMCACH1A_PEA_{—}1_T2 (SEQ ID NO:707, HUMCACH1A_PEA_{—}1_T3 (SEQ ID NO:708), HUMCACH1A_PEA_{—}1_T4 (SEQ ID NO:709), HUMCACH1A_PEA_{—}1_T6 (SEQ ID NO:710), HUMCACH1A_PEA_{—}1_T7 (SEQ ID NO:711), HUMCACH1A_PEA_{—}1_T8 (SEQ ID NO:712), HUMCACH1A_PEA_{—}1_T13 (SEQ ID NO:714), HUMCACH1A_PEA_{—}1_T14 (SEQ ID NO:715), HUMCACH1A_PEA_{—}1_T15 (SEQ ID NO:716), HUMCACH1A_PEA_{—}1_T16 (SEQ ID NO:717), HUMCACH1A_PEA_{—}1_T20 (SEQ ID NO:721) and HUMCACH1A_PEA_{—}1_T22 (SEQ ID NO:722). Table 46 below describes the starting and ending position of this segment on each transcript.

[2760] Segment cluster HUMCACH1A_PEA_{—}1_node_{—}16 (SEQ ID NO:728) according to the present invention is supported by 2 libraries. The number of libraries was determined as previously described. This segment can be found in the following transcript(s): HUMCACH1A_PEA_{—}1_T0 (SEQ ID NO:705), HUMCACH1A_PEA_{—}1_T1 (SEQ ID NO:706) HUMCACH1A_PEA_{—}1_T2 (SEQ ID NO:707), HUMCACH1A_PEA_{—}1_T3 (SEQ ID NO:708), HUMCACH1A_PEA_{—}1_T4 (SEQ ID NO:709), HUMCACH1A_PEA_{—}1_T6 (SEQ ID NO:710), HUMCACH1A_PEA_{—}1_T7 (SEQ ID NO:711), HUMCACH1A_PEA_{—}1_T8 (SEQ ID NO:712), HUMCACH1A_PEA_{—}1_T13 (SEQ ID NO:714), HUMCACH1A_PEA_{—}1_T14 (SEQ ID NO:715), HUMCACH1A_PEA_{—}1_T15 (SEQ ID NO:716), HUMCACH1A_PEA_{—}1_T16 (SEQ ID NO:717), HUMCACH1A_PEA_{—}1_T20 (SEQ ID NO:721) and HUMCACH1A_PEA_{—}1_T22 (SEQ ID NO:722). Table 47 below describes the starting and ending position of this segment on each transcript.

[2761] Segment cluster HUMCACH1A_PEA_{—}1_node_{—}27 (SEQ ID NO:729) according to the present invention is supported by 1 libraries. The number of libraries was determined as previously described. This segment can be found in the following transcript(s): HUMCACH1A_PEA_{—}1_T20 (SEQ ID NO:721). Table 48 below describes the starting and ending position of this segment on each transcript.

[2762] Segment cluster HUMCACH1A_PEA_{—}1_node_{—}30 (SEQ ID NO:730) according to the present invention is supported by 8 libraries. The number of libraries was determined as previously described. This segment can be found in the following transcript(s): HUMCACH1A_PEA_{—}1_T22 (SEQ ID NO:722). Table 49 below describes the starting and ending position of this segment on each transcript.

[2763] Segment cluster HUMCACH1A_PEA_{—}1_node_{—}33 (SEQ ID NO:731) according to the present invention is supported by 3 libraries. The number of libraries was determined as previously described. This segment can be found in the following transcript(s): HUMCACH1A_PEA_{—}1_T0 (SEQ ID NO:705), HUMCACH1A_PEA_{—}1_T1 (SEQ ID NO:706) HUMCACH1A_PEA_{—}1_T2 (SEQ ID NO:707), HUMCACH1A_PEA_{—}1_T3 (SEQ ID NO:708), HUMCACH1A_PEA_{—}1_T4 (SEQ ID NO:709), HUMCACH1A_PEA_{—}1_T6 (SEQ ID NO:710), HUMCACH1A_PEA_{—}1_T7 (SEQ ID NO:711), HUMCACH1A_PEA_{—}1_T8 (SEQ ID NO:712), HUMCACH1A_PEA_{—}1_T12 (SEQ ID NO:713), HUMCACH1A_PEA_{—}1_T13 (SEQ ID NO:714), HUMCACH1A_PEA_{—}1_T14 (SEQ ID NO:715), HUMCACH1A_PEA_{—}1_T15 (SEQ ID NO:716) and HUMCACH1A_PEA_{—}1_T16 (SEQ ID NO:717). Table 50 below describes the starting and ending position of this segment on each transcript.

[2764] Segment cluster HUMCACH1A_PEA_{—}1_node_{—}41 (SEQ ID NO:732) according to the present invention is supported by 5 libraries. The number of libraries was determined as previously described. This segment can be found in the following transcript(s): HUMCACH1A_PEA_{—}1_T0 (SEQ ID NO:705), HUMCACH1A_PEA_{—}1_T1 (SEQ ID NO:706) HUMCACH1A_PEA_{—}1_T2 (SEQ ID NO:707), HUMCACH1A_PEA_{—}1_T3 (SEQ ID NO:708), HUMCACH1A_PEA_{—}1_T4 (SEQ ID NO:709), HUMCACH1A_PEA_{—}1_T6 (SEQ ID NO:710), HUMCACH1A_PEA_{—}1_T7 (SEQ ID NO:711), HUMCACH1A_PEA_{—}1_T8 (SEQ ID NO:712), HUMCACH1A_PEA_{—}1_T12 (SEQ ID NO:713), HUMCACH1A_PEA_{—}1_T13 (SEQ ID NO:714), HUMCACH1A_PEA_{—}1_T14 (SEQ ID NO:715), HUMCACH1A_PEA_{—}1_T15 (SEQ ID NO:716) and HUMCACH1A_PEA_{—}1_T16 (SEQ ID NO:717). Table 51 below describes the starting and ending position of this segment on each transcript.

[2765] Segment cluster HUMCACH1A_PEA_{—}1_node_{—}43 (SEQ ID NO:733) according to the present invention is supported by 5 libraries. The number of libraries was determined as previously described. This segment can be found in the following transcript(s): HUMCACH1A_PEA_{—}1_T0 (SEQ ID NO:705), HUMCACH1A_PEA_{—}1_T1 (SEQ ID NO:706) HUMCACH1A_PEA_{—}1_T2 (SEQ ID NO:707), HUMCACH1A_PEA_{—}1_T3 (SEQ ID NO:708), HUMCACH1A_PEA_{—}1_T4 (SEQ ID NO:709), HUMCACH1A_PEA_{—}1_T6 (SEQ ID NO:710), HUMCACH1A_PEA_{—}1_T7 (SEQ ID NO:711), HUMCACH1A_PEA_{—}1_T8 (SEQ ID NO:712), HUMCACH1A_PEA_{—}1_T12 (SEQ ID NO:713), HUMCACH1A_PEA_{—}1_T13 (SEQ ID NO:714), HUMCACH1A_PEA_{—}1_T14 (SEQ ID NO:7-15), HUMCACH1A_PEA_{—}1_T15 (SEQ ID NO:716) and HUMCACH1A_PEA_{—}1_T16 (SEQ ID NO:717). Table 52 below describes the starting and ending position of this segment on each transcript.

[2766] Segment cluster HUMCACH1A_PEA_{—}1_node_{—}45 (SEQ ID NO:734) according to the present invention is supported by 4 libraries. The number of libraries was determined as previously described. This segment can be found in the following transcript(s): HUMCACH1A_PEA_{—}1_T0 (SEQ ID NO:705), HUMCACH1A_PEA_{—}1_T1 (SEQ ID NO:706) HUMCACH1A_PEA_{—}1_T2 (SEQ ID NO:707), HUMCACH1A_PEA_{—}1_T3 (SEQ ID NO:708), HUMCACH1A_PEA_{—}1_T4 (SEQ ID NO:709), HUMCACH1A_PEA_{—}1_T6 (SEQ ID NO:710), HUMCACH1A_PEA_{—}1_T7 (SEQ ID NO:711), HUMCACH1A_PEA_{—}1_T8 (SEQ ID NO:712), HUMCACH1A_PEA_{—}1_T12 (SEQ ID NO:713), HUMCACH1A_PEA_{—}1_T13 (SEQ ID NO:714), HUMCACH1A_PEA_{—}1_T14 (SEQ ID NO:715), HUMCACH1A_PEA_{—}1_T15 (SEQ ID NO:716) and HUMCACH1A_PEA_{—}1_T16 (SEQ ID NO:717). Table 53 below describes the starting and ending position of this segment on each transcript.

[2767] Segment cluster HUMCACH1A_PEA_{—}1_node_{—}47 (SEQ ID NO:735) according to the present invention is supported by 3 libraries. The number of libraries was determined as previously described. This segment can be found in the following transcript(s): HUMCACH1A_PEA_{—}1_T0 (SEQ ID NO:705), HUMCACH1A_PEA_{—}1_T1 (SEQ ID NO:706), HUMCACH1A_PEA_{—}1_T2 (SEQ ID NO:707), HUMCACH1A_PEA_{—}1_T3 (SEQ ID NO:708), HUMCACH1A_PEA_{—}1_T4 (SEQ ID NO:709), HUMCACH1A_PEA_{—}1_T6 (SEQ ID NO:710), HUMCACH1A_PEA_{—}1_T7 (SEQ ID NO:711), HUMCACH1A_PEA_{—}1_T8 (SEQ ID NO:712), HUMCACH1A_PEA_{—}1_T12 (SEQ ID NO:713), HUMCACH1A_PEA_{—}1_T13 (SEQ ID NO:714), HUMCACH1A_PEA_{—}1_T14 (SEQ ID NO:715), HUMCACH1A_PEA_{—}1_T15 (SEQ ID NO:716) and HUMCACH1A_PEA_{—}1_T16 (SEQ ID NO:717). Table 54 below describes the starting and ending position of this segment on each transcript.

[2768] Segment cluster HUMCACH1A_PEA_{—}1_node_{—}55 (SEQ ID NO:736) according to the present invention is supported by 6 libraries. The number of libraries was determined as previously described. This segment can be found in the following transcript(s): HUMCACH1A_PEA_{—}1_T0 (SEQ ID NO:705), HUMCACH1A_PEA_{—}1_T1 (SEQ ID NO:706), HUMCACH1A_PEA_{—}1_T2 (SEQ ID NO:707), HUMCACH1A_PEA_{—}1_T3 (SEQ ID NO:708), HUMCACH1A_PEA_{—}1_T4 (SEQ ID NO:709), HUMCACH1A_PEA_{—}1_T6 (SEQ ID NO:710), HUMCACH1A_PEA_{—}1_T7 (SEQ ID NO:711), HUMCACH1A_PEA_{—}1_T8 (SEQ ID NO:712), HUMCACH1A_PEA_{—}1_T12 (SEQ ID NO:713), HUMCACH1A_PEA_{—}1_T13 (SEQ ID NO:714), HUMCACH1A_PEA_{—}1_T14 (SEQ ID NO:715), HUMCACH1A_PEA_{—}1_T15 (SEQ ID NO:716) and HUMCACH1A_PEA_{—}1_T16 (SEQ ID NO:717). Table 55 below describes the starting and ending position of this segment on each transcript.

[2769] Segment cluster HUMCACH1A_PEA_{—}1_node_{—}57 (SEQ ID NO:737) according to the present invention is supported by 7 libraries. The number of libraries was determined as previously described. This segment can be found in the following transcript(s): HUMCACH1A_PEA_{—}1_T0 (SEQ ID NO:705), HUMCACH1A_PEA_{—}1_T1 (SEQ ID NO:706) 5, HUMCACH1A_PEA_{—}1_T2 (SEQ ID NO:707), HUMCACH1A_PEA_{—}1_T3 (SEQ ID NO:708), HUMCACH1A_PEA_{—}1_T4 (SEQ ID NO:709), HUMCACH1A_PEA_{—}1_T6 (SEQ ID NO:710), HUMCACH1A_PEA_{—}1_T7 (SEQ ID NO:711), HUMCACH1A_PEA_{—}1_T8 (SEQ ID NO:712), HUMCACH1A_PEA_{—}1_T12 (SEQ ID NO:713), HUMCACH1A_PEA_{—}1_T13 (SEQ ID NO:714), HUMCACH1A_PEA_{—}1_T14 (SEQ ID NO:715), HUMCACH1A_PEA_{—}1_T15 (SEQ ID NO:716) and HUMCACH1A_PEA_{—}1_T16 (SEQ ID NO:717). Table 56 below describes the starting and ending position of this segment on each transcript.

[2770] Segment cluster HUMCACH1A_PEA_{—}1_node_{—}70 (SEQ ID NO:738) according to the present invention is supported by 3 libraries. The number of libraries was determined as previously described. This segment can be found in the following transcript(s): HUMCACH1A_PEA_{—}1_T0 (SEQ ID NO:705), HUMCACH1A_PEA_{—}1_T1 (SEQ ID NO:706), HUMCACH1A_PEA_{—}1_T2 (SEQ ID NO:707), HUMCACH1A_PEA_{—}1_T3 (SEQ ID NO:708), HUMCACH1A_PEA_{—}1_T4 (SEQ ID NO:709), HUMCACH1A_PEA_{—}1_T6 (SEQ ID NO:710), HUMCACH1A_PEA_{—}1_T7 (SEQ ID NO:711), HUMCACH1A_PEA_{—}1_T8 (SEQ ID NO:712), HUMCACH1A_PEA_{—}1_T12 (SEQ ID NO:713), HUMCACH1A_PEA_{—}1_T13(SEQ ID NO:714), HUMCACH1A_PEA_{—}1_T14 (SEQ ID NO:715) and HUMCACH1A_PEA_{—}1_T15 (SEQ ID NO:716). Table 57 below describes the starting and ending position of this segment on each transcript.

[2771] Segment cluster HUMCACH1A_PEA_{—}1_node_{—}72 (SEQ ID NO:739) according to the present invention is supported by 2 libraries. The number of libraries was determined as previously described. This segment can be found in the following transcript(s): HUMCACH1A_PEA_{—}1_T0 (SEQ ID NO:705), HUMCACH1A_PEA_{—}1_T1 (SEQ ID NO:706), HUMCACH1A_PEA_{—}1_T2 (SEQ ID NO:707), HUMCACH1A_PEA_{—}1_T3 (SEQ ID NO:708), HUMCACH1A_PEA_{—}1_T4 (SEQ ID NO:709), HUMCACH1A_PEA_{—}1_T6 (SEQ ID NO:710), HUMCACH1A_PEA_{—}1_T7 (SEQ ID NO:711), HUMCACH1A_PEA_{—}1_T8 (SEQ ID NO:712), HUMCACH1A_PEA_{—}1_T12(SEQ ID NO:713), HUMCACH1A_PEA_{—}1_T13 (SEQ ID NO:714), HUMCACH1A_PEA_{—}1_T14 (SEQ ID NO:715) and HUMCACH1A_PEA_{—}1_T15 (SEQ ID NO:716). Table 58 below describes the starting and ending position of this segment on each transcript.

[2772] Segment cluster HUMCACH1A_PEA_{—}1_node_{—}74 (SEQ ID NO:740) according to the present invention is supported by 2 libraries. The number of libraries was determined as previously described. This segment can be found in the following transcript(s): HUMCACH1A_PEA_{—}1_T0 (SEQ ID NO:705), HUMCACH1A_PEA_{—}1_T1 (SEQ ID NO:706), HUMCACH1A_PEA_{—}1_T2 (SEQ ID NO:707), HUMCACH1A_PEA_{—}1_T3 (SEQ ID NO:708), HUMCACH1A_PEA_{—}1_T4 (SEQ ID NO:709), HUMCACH1A_PEA_{—}1_T6 (SEQ ID NO:710), HUMCACH1A_PEA_{—}1_T7 (SEQ ID NO:711), HUMCACH1A_PEA_{—}1_T8 (SEQ ID NO:712), HUMCACH1A_PEA_{—}1_T12 (SEQ ID NO:713), HUMCACH1A_PEA_{—}1_T13 (SEQ ID NO:714), HUMCACHLA_PEA_{—}1_T14 (SEQ ID NO:715) and HUMCACH1A_PEA_{—}1_T15 (SEQ ID NO:716). Table 59 below describes the starting and ending position of this segment on each transcript.

[2773] Segment cluster HUMCACH1A_PEA_{—}1_node_{—}86 (SEQ ID NO:741) according to the present invention is supported by 1 libraries. The number of libraries was determined as previously described. This segment can be found in the following transcript(s): HUMCACH1A_PEA_{—}1_T0 (SEQ ID NO:705), HUMCACH1A_PEA_{—}1_T1 (SEQ ID NO:706), HUMCACH1A_PEA_{—}1_T2 (SEQ ID NO:707), HUMCACH1A_PEA_{—}1_T3 (SEQ ID NO:708), HUMCACH1A_PEA_{—}1_T4 (SEQ ID NO:709), HUMCACH1A_PEA_{—}1_T6 (SEQ ID NO:710), HUMCACH1A_PEA_{—}1_T7 (SEQ ID NO:711), HUMCACH1A_PEA_{—}1_T8 (SEQ ID NO:712), HUMCACH1A_PEA_{—}1_T12 (SEQ ID NO:713), HUMCACH1A_PEA_{—}1_T13 (SEQ ID NO:714), HUMCACH1A_PEA_{—}1_T14 (SEQ ID NO:715) and HUMCACH1A_PEA_{—}1_T17 (SEQ ID NO:718). Table 60 below describes the starting and ending position of this segment on each transcript.

[2774] Segment cluster HUMCACH1A_PEA_{—}1_node_{—}92 (SEQ ID NO:742) according to the present invention is supported by 2 libraries. The number of libraries was determined as previously described. This segment can be found in the following transcript(s): HUMCACH1A_PEA_{—}1_T0 (SEQ ID NO:705), HUMCACH1A_PEA_{—}1_T1 (SEQ ID NO:706), HUMCACH1A_PEA_{—}1_T2 (SEQ ID NO:707), HUMCACH1A_PEA_{—}1_T3 (SEQ ID NO:708), HUMCACH1A_PEA_{—}1_T4 (SEQ ID NO:709), HUMCACH1A_PEA_{—}1_T6 (SEQ ID NO:710), HUMCACH1A_PEA_{—}1_T7 (SEQ ID NO:711), HUMCACH1A_PEA_{—}1_T8 (SEQ ID NO:712), HUMCACH1A_PEA_{—}1_T12 (SEQ ID NO:713), HUMCACH1A_PEA_{—}1_T13 (SEQ ID NO:714), HUMCACH1A_PEA_{—}1_T14 (SEQ ID NO:715) and HUMCACH1A_PEA_{—}1_T17 (SEQ ID NO:718). Table 61 below describes the starting and ending position of this segment on each transcript.

[2775] Segment cluster HUMCACH1A_PEA_{—}1_node_{—}94 (SEQ ID NO:743) according to the present invention is supported by 4 libraries. The number of libraries was determined as previously described. This segment can be found in the following transcript(s): HUMCACH1A_PEA_{—}1_T0 (SEQ ID NO:705), HUMCACH1A_PEA_{—}1_T1 (SEQ ID NO:706), HUMCACH1A_PEA_{—}1_T2 (SEQ ID NO:707), HUMCACH1A_PEA_{—}1_T3 (SEQ ID NO:708), HUMCACH1A_PEA_{—}1_T4 (SEQ ID NO:709), HUMCACH1A_PEA_{—}1_T6 (SEQ ID NO:710), HUMCACH1A_PEA_{—}1_T7 (SEQ ID NO:711), HUMCACH1A_PEA_{—}1_T8 (SEQ ID NO:712), HUMCACH1A_PEA_{—}1_T12 (SEQ ID NO:713), HUMCACH1A_PEA_{—}1_T13 (SEQ ID NO:714), HUMCACH1A_PEA_{—}1_T14 (SEQ ID NO:715) and HUMCACH1A_PEA_{—}1_T17 (SEQ ID NO:718). Table 62 below describes the starting and ending position of this segment on each transcript.

[2776] Segment cluster HUMCACH1A_PEA_{—}1_node_{—}103 (SEQ ID NO:744) according to the present invention is supported by 2 libraries. The number of libraries was determined as previously described. This segment can be found in the following transcript(s): HUMCACH1A_PEA_{—}1_T18 (SEQ ID NO:719). Table 63 below describes the starting and ending position of this segment on each transcript.

[2777] Segment cluster HUMCACH1A_PEA_{—}1_node_{—}104 (SEQ ID NO:745) according to the present invention is supported by 3 libraries. The number of libraries was determined as previously described. This segment can be found in the following transcript(s): HUMCACH1A_PEA_{—}1_T0 (SEQ ID NO:705), HUMCACH1A_PEA_{—}1_T1 (SEQ ID NO:706), HUMCACH1A_PEA_{—}1_T2 (SEQ ID NO:707), HUMCACH1A_PEA_{—}1_T3 (SEQ ID NO:708), HUMCACH1A_PEA_{—}1_T4 (SEQ ID NO:709), HUMCACH1A_PEA_{—}1_T6 (SEQ ID NO:710), HUMCACH1A_PEA_{—}1_T7 (SEQ ID NO:711), HUMCACHLA_PEA_{—}1_T8 (SEQ ID NO:712), HUMCACH1A_PEA_{—}1_T12 (SEQ ID NO:713), HUMCACH1A_PEA_{—}1_T13 (SEQ ID NO:714), HUMCACH1A_PEA_{—}1_T17 (SEQ ID NO:718) and HUMCACH1A_PEA_{—}1_T18 (SEQ ID NO:719). Table 64 below describes the starting and ending position of this segment on each transcript.

[2778] Segment cluster HUMCACH1A_PEA_{—}1_node_{—}106 (SEQ ID NO:746) according to the present invention is supported by 4 libraries. The number of libraries was determined as previously described. This segment can be found in the following transcript(s): HUMCACH1A_PEA_{—}1_T19 (SEQ ID NO:720). Table 65 below describes the starting and ending position of this segment on each transcript.

[2779] Segment cluster HUMCACH1A_PEA_{—}1_node_{—}109 (SEQ ID NO:747) according to the present invention is supported by 6 libraries. The number of libraries was determined as previously described. This segment can be found in the following transcript(s): HUMCACH1A_PEA_{—}1_T0 (SEQ ID NO:705), HUMCACH1A_PEA_{—}1_T1 (SEQ ID NO:706), HUMCACH1A_PEA_{—}1_T2 (SEQ ID NO:707), HUMCACH1A_PEA_{—}1_T3 (SEQ ID NO:708), HUMCACH1A_PEA_{—}1_T4 (SEQ ID NO:709), HUMCACH1A_PEA_{—}1_T6 (SEQ ID NO:710), HUMCACH1A_PEA_{—}1_T7 (SEQ ID NO:711), HUMCACH1A_PEA_{—}1_T8 (SEQ ID NO:712), HUMCACH1A_PEA_{—}1_T12 (SEQ ID NO:713), HUMCACH1A_PEA_{—}1_T13 (SEQ ID NO:714), HUMCACH1A_PEA_{—}1_T17 (SEQ ID NO:718), HUMCACH1A_PEA_{—}1_T18(SEQ ID NO:719) and HUMCACH1A_PEA_{—}1_T19 (SEQ ID NO:720). Table 66 below describes the starting and ending position of this segment on each transcript.

[2780] Segment cluster HUMCACH1A_PEA_{—}1_node_{—}113 (SEQ ID NO:748) according to the present invention is supported by 4 libraries. The number of libraries was determined as previously described. This segment can be found in the following transcript(s): HUMCACH1A_PEA_{—}1_T0 (SEQ ID NO:705), HUMCACH1A_PEA_{—}1_T1 (SEQ ID NO:706) 5, HUMCACH1A_PEA_{—}1_T2 (SEQ ID NO:707), HUMCACH1A_PEA_{—}1_T3 (SEQ ID NO:708), HUMCACH1A_PEA_{—}1_T4 (SEQ ID NO:709), HUMCACH1A_PEA_{—}1_T6 (SEQ ID NO:710), HUMCACH1A_PEA_{—}1_T7 (SEQ ID NO:711), HUMCACH1A_PEA_{—}1_T8 (SEQ ID NO:712), HUMCACH1A_PEA_{—}1_T12 (SEQ ID NO:713), HUMCACH1A_PEA_{—}1_T13 (SEQ ID NO:714), HUMCACH1A_PEA_{—}1_T17 (SEQ ID NO:718), HUMCACH1A_PEA_{—}1_T18(SEQ ID NO:719) and HUMCACH1A_PEA_{—}1_T19 (SEQ ID NO:720). Table 67 below describes the starting and ending position of this segment on each transcript.

[2781] Segment cluster HUMCACH1A_PEA_{—}1_node_{—}114 (SEQ ID NO:749) according to the present invention is supported by 1 libraries. The number of libraries was determined as previously described. This segment can be found in the following transcript(s): HUMCACH1A_PEA_{—}1_T6 (SEQ ID NO:710). Table 68 below describes the starting and ending position of this segment on each transcript.

[2782] Segment cluster HUMCACH1A_PEA_{—}1_node_{—}116 (SEQ ID NO:750) according to the present invention is supported by 4 libraries. The number of libraries was determined as previously described. This segment can be found in the following transcript(s): HUMCACH1A_PEA_{—}1_T0 (SEQ ID NO:705), HUMCACH1A_PEA_{—}1_T1 (SEQ ID NO:706), HUMCACH1A_PEA_{—}1_T2 (SEQ ID NO:707), HUMCACH1A_PEA_{—}1_T3 (SEQ ID NO:708), HUMCACH1A_PEA_{—}1_T4 (SEQ ID NO:709), HUMCACH1A_PEA_{—}1_T6 (SEQ ID NO:710), HUMCACH1A_PEA_{—}1_T7(SEQ ID NO:711), HUMCACH1A_PEA_{—}1_T8 (SEQ ID NO:712), HUMCACH1A_PEA_{—}1_T12 (SEQ ID NO:713), HUMCACH1A_PEA_{—}1_T13(SEQ ID NO:714), HUMCACH1A_PEA_{—}1_T17(SEQ ID NO:718), HUMCACH1A_PEA_{—}1_T18(SEQ ID NO:719) and HUMCACH1A_PEA_{—}1_T19 (SEQ ID NO:720). Table 69 below describes the starting and ending position of this segment on each transcript.

[2783] Segment cluster HUMCACH1A_PEA_{—}1_node_{—}119 (SEQ ID NO:751) according to the present invention is supported by 4 libraries. The number of libraries was determined as previously described. This segment can be found in the following transcript(s): HUMCACH1A_PEA_T0 (SEQ ID NO:705), HUMCACH1A_PEA_{—}1_T1 (SEQ ID NO:706) HUMCACH1A_PEA_{—}1_T2 (SEQ ID NO:707), HUMCACH1A_PEA_{—}1_T3 (SEQ ID NO:708), HUMCACH1A_PEA_{—}1_T4 (SEQ ID NO:709), HUMCACH1A_PEA_{—}1_T6 (SEQ ID NO:710), HUMCACH1A_PEA_{—}1_T7 (SEQ ID NO:711), HUMCACH1A_PEA_{—}1_T8 (SEQ ID NO:712), HUMCACH1A_PEA_{—}1_T12 (SEQ ID NO:713), HUMCACH1A_PEA_{—}1_T17 (SEQ ID NO:718), HUMCACH1A_PEA_{—}1_T18 (SEQ ID NO:719) and HUMCACH1A_PEA_{—}1_T19 (SEQ ID NO:720). Table 70 below describes the starting and ending position of this segment on each transcript.

[2784] Segment cluster HUMCACH1A_PEA_{—}1_node_{—}121 (SEQ ID NO:752) according to the present invention is supported by 15 libraries. The number of libraries was determined as previously described. This segment can be found in the following transcript(s): HUMCACH1A_PEA_{—}1_T0 (SEQ ID NO:705), HUMCACH1A_PEA_{—}1_T1 (SEQ ID NO:706), HUMCACH1A_PEA_{—}1_T2 (SEQ ID NO:707), HUMCACH1A_PEA_{—}1_T3 (SEQ ID NO:708), HUMCACH1A_PEA_{—}1_T4 (SEQ ID NO:709), HUMCACH1A_PEA_{—}1_T6 (SEQ ID NO:710), HUMCACH1A_PEA_{—}1_T7 (SEQ ID NO:711), HUMCACH1A_PEA_{—}1_T8 (SEQ ID NO:712), HUMCACH1A_PEA_{—}1_T12 (SEQ ID NO:713), HUMCACH1A_PEA_{—}1_T17 (SEQ ID NO:718), HUMCACH1A_PEA_{—}1_T18 (SEQ ID NO:719) and HUMCACH1A_PEA_{—}1_T19 (SEQ ID NO:720). Table 71 below describes the starting and ending position of this segment on each transcript.

[2785] Segment cluster HUMCACH1A_PEA_{—}1_node_{—}123 (SEQ ID NO:753) according to the present invention is supported by 28 libraries. The number of libraries was determined as previously described. This segment can be found in the following transcript(s): HUMCACH1A_PEA_{—}1_T0 (SEQ ID NO:705), HUMCACH1A_PEA_{—}1_T1 (SEQ ID NO:706), HUMCACH1A_PEA_{—}1_T2 (SEQ ID NO:707), HUMCACH1A_PEA_{—}1_T3 (SEQ ID NO:708), HUMCACH1A_PEA_{—}1_T4 (SEQ ID NO:709), HUMCACH1A_PEA_{—}1_T6 (SEQ ID NO:710), HUMCACH1A_PEA_{—}1_T7 (SEQ ID NO:711), HUMCACH1A_PEA_{—}1_T8 (SEQ ID NO:712), HUMCACH1A_PEA_{—}1_T12 (SEQ ID NO:713), HUMCACH1A_PEA_{—}1_T17 (SEQ ID NO:718), HUMCACH1A_PEA_{—}1_T18 (SEQ ID NO:719) and HUMCACH1A_PEA_{—}1_T19 (SEQ ID NO:720). Table 72 below describes the starting and ending position of this segment on each transcript.

[2786] Segment cluster HUMCACH1A_PEA_{—}1_node_{—}125 (SEQ ID NO:754) according to the present invention is supported by 48 libraries. The number of libraries was determined as previously described. This segment can be found in the following transcript(s): HUMCACH1A_PEA_T0 (SEQ ID NO:705), HUMCACH1A_PEA_{—}1_T1 (SEQ ID NO:706) HUMCACH1A_PEA_{—}1_T2 (SEQ ID NO:707), HUMCACH1A_PEA_{—}1_T3 (SEQ ID NO:708), HUMCACH1A_PEA_{—}1_T4 (SEQ ID NO:709), HUMCACH1A_PEA_{—}1_T6 (SEQ ID NO:710), HUMCACH1A_PEA_{—}1_T7 (SEQ ID NO:711), HUMCACH1A_PEA_{—}1_T8 (SEQ ID NO:712), HUMCACH1A_PEA_{—}1_T12 (SEQ ID NO:713), HUMCACH1A_PEA_{—}1_T17 (SEQ ID NO:718), HUMCACH1A_PEA_{—}1_T18 (SEQ ID NO:719) and HUMCACH1A_PEA_{—}1_T19 (SEQ ID NO:720). Table 73 below describes the starting and ending position of this segment on each transcript.

[2787] Segment cluster HUMCACH1A_PEA_{—}1_node_{—}128 (SEQ ID NO:755) according to the present invention is supported by 1 libraries. The number of libraries was determined as previously described. This segment can be found in the following transcript(s): HUMCACH1A_PEA_{—}1_T2 (SEQ ID NO:707). Table 74 below describes the starting and ending position of this segment on each transcript.

[2788] According to an optional embodiment of the present invention, short segments related to the above cluster are also provided. These segments are up to about 120 bp in length, and so are included in a separate description.

[2789] Segment cluster HUMCACH1A_PEA_{—}1_node_{—}0 (SEQ ID NO:756) according to the present invention is supported by 1 libraries. The number of libraries was determined as previously described. This segment can be found in the following transcript(s): HUMCACH1A_PEA_{—}1_T1 (SEQ ID NO:706). Table 75 below describes the starting and ending position of this segment on each transcript.

[2790] Segment cluster HUMCACH1A_PEA_{—}1_node_{—}3 (SEQ ID NO:757) according to the present invention is supported by 2 libraries. The number of libraries was determined as previously described. This segment can be found in the following transcript(s): HUMCACH1A_PEA_{—}1_T0 (SEQ ID NO:705), HUMCACH1A_PEA_{—}1_T1 (SEQ ID NO:706), HUMCACH1A_PEA_{—}1_T2 (SEQ ID NO:707), HUMCACH1A_PEA_{—}1_T3 (SEQ ID NO:708), HUMCACH1A_PEA_{—}1_T4 (SEQ ID NO:709), HUMCACH1A_PEA_{—}1_T6 (SEQ ID NO:710), HUMCACH1A_PEA_{—}_T7 (SEQ ID NO:711), HUMCACH1A_PEA_{—}1_T8 (SEQ ID NO:712), HUMCACH1A_PEA_{—}1_T13 (SEQ ID NO:714), HUMCACH1A_PEA_{—}1_T14 (SEQ ID NO:715), HUMCACH1A_PEA_{—}1_T15 (SEQ ID NO:716), HUMCACH1A_PEA_{—}1_T16 (SEQ ID NO:717), HUMCACH1A_PEA_{—}1_T20 (SEQ ID NO:721) and HUMCACH1A_PEA_{—}1_T22 (SEQ ID NO:722). Table 76 below describes the starting and ending position of this segment on each transcript.

[2791] Segment cluster HUMCACH1A_PEA_{—}1_node_{—}7 (SEQ ID NO:758) according to the present invention is supported by 2 libraries. The number of libraries was determined as previously described. This segment can be found in the following transcript(s): HUMCACH1A_PEA_{—}1_T0 (SEQ ID NO:705), HUMCACH1A_PEA_{—}1_T1 (SEQ ID NO:706), HUMCACH1A_PEA_{—}1_T2 (SEQ ID NO:707), HUMCACH1A_PEA_{—}1_T3 (SEQ ID NO:708), HUMCACH1A_PEA_{—}1_T4 (SEQ ID NO:709), HUMCACH1A_PEA_{—}1_T6 (SEQ ID NO:710), HUMCACH1A_PEA_{—}1_T7 (SEQ ID NO:711), HUMCACH1A_PEA_{—}1_T8 (SEQ ID NO:712), HUMCACH1A_PEA_{—}1_T13 (SEQ ID NO:714), HUMCACH1A_PEA_{—}1_T14 (SEQ ID NO:715), HUMCACH1A_PEA_{—}1_T15 (SEQ ID NO:716), HUMCACH1A_PEA_{—}1_T16 (SEQ ID NO:717), HUMCACH1A_PEA_{—}1_T20 (SEQ ID NO:721) and HUMCACH1A_PEA_{—}1_T22 (SEQ ID NO:722). Table 77 below describes the starting and ending position of this segment on each transcript.

[2792] Segment cluster HUMCACH1A_PEA_{—}1_node_{—}23 (SEQ ID NO:759) according to the present invention is supported by 5 libraries. The number of libraries was determined as previously described. This segment can be found in the following transcript(s): HUMCACH1A_PEA_{—}1_T8 (SEQ ID NO:712) and HUMCACH1A_PEA_{—}1_T22 (SEQ ID NO:722). Table 78 below describes the starting and ending position of this segment on each transcript.

[2793] Segment cluster HUMCACH1A_PEA_{—}1_node_{—}26 (SEQ ID NO:760) according to the present invention is supported by 2 libraries. The number of libraries was determined as previously described. This segment can be found in the following transcript(s): HUMCACH1A_PEA_{—}1_T0 (SEQ ID NO:705), HUMCACH1A_PEA_{—}1_T1 (SEQ ID NO:706) HUMCACH1A_PEA_{—}1_T2 (SEQ ID NO:707), HUMCACH1A_PEA_{—}1_T3 (SEQ ID NO:708), HUMCACH1A_PEA_{—}1_T4 (SEQ ID NO:709), HUMCACH1A_PEA_{—}1_T6 (SEQ ID NO:710), HUMCACH1A_PEA_{—}1_T7 (SEQ ID NO:711), HUMCACH1A_PEA_{—}1_T13 (SEQ ID NO:714), HUMCACH1A_PEA_{—}1_T14 (SEQ ID NO:715), HUMCACH1A_PEA_{—}1_T15 (SEQ ID NO:716), HUMCACH1A_PEA_{—}1_T16 (SEQ ID NO:717) and HUMCACH1A_PEA_{—}1_T20 (SEQ ID NO:721). Table 79 below describes the starting and ending position of this segment on each transcript.

[2794] Segment cluster HUMCACH1A_PEA_{—}1_node_{—}32 (SEQ ID NO:761) according to the present invention is supported by 2 libraries. The number of libraries was determined as previously described. This segment can be found in the following transcript(s): HUMCACH1A_PEA_{—}1_T12 (SEQ ID NO:713). Table 80 below describes the starting and ending position of this segment on each transcript.

[2795] Segment cluster HUMCACH1A_PEA_{—}1_node_{—}35 (SEQ ID NO:762) according to the present invention is supported by 1 libraries. The number of libraries was determined as previously described. This segment can be found in the following transcript(s): HUMCACH1A_PEA_{—}1_T0 (SEQ ID NO:705), HUMCACH1A_PEA_{—}1_T1 (SEQ ID NO:706), HUMCACH1A_PEA_{—}1_T2 (SEQ ID NO:707), HUMCACH1A_PEA_{—}1_T3 (SEQ ID NO:708), HUMCACH1A_PEA_{—}1_T4 (SEQ ID NO:709), HUMCACH1A_PEA_{—}1_T6 (SEQ ID NO:710, HUMCACH1A_PEA_{—}1_T7(SEQ ID NO:711), HUMCACH1A_PEA_{—}1_T8 (SEQ ID NO:712), HUMCACH1A_PEA_{—}1_T12 (SEQ ID NO:713), HUMCACH1A_PEA_{—}1_T13 (SEQ ID NO:714), HUMCACH1A_PEA_{—}1_T14 (SEQ ID NO:715), HUMCACH1A_PEA_{—}1_T15 (SEQ ID NO:716) and HUMCACH1A_PEA_{—}1_T16 (SEQ ID NO:717). Table 81 below describes the starting and ending position of this segment on each transcript.

[2796] Segment cluster HUMCACH1A_PEA_{—}1_node_{—}37 (SEQ ID NO:763) according to the present invention is supported by 1 libraries. The number of libraries was determined as previously described. This segment can be found in the following transcript(s): HUMCACH1A_PEA_{—}1_T0 (SEQ ID NO:705), HUMCACH1A_PEA_{—}1_T1 (SEQ ID NO:706) HUMCACH1A_PEA_{—}1_T2 (SEQ ID NO:707), HUMCACH1A_PEA_{—}1_T3 (SEQ ID NO:708), HUMCACH1A_PEA_{—}1_T4 (SEQ ID NO:709), HUMCACH1A_PEA_{—}1_T6 (SEQ ID NO:710), HUMCACH1A_PEA_{—}1_T7 (SEQ ID NO:711), HUMCACH1A_PEA_{—}1_T12 (SEQ ID NO:713), HUMCACH1A_PEA_{—}1_T13 (SEQ ID NO:714), HUMCACH1A_PEA_{—}1_T14 (SEQ ID NO:715), HUMCACH1A_PEA_{—}1_T15 (SEQ ID NO:716) and HUMCACH1A_PEA_{—}1_T16 (SEQ ID NO:717). Table 82 below describes the starting and ending position of this segment on each transcript.

[2797] Segment cluster HUMCACH1A_PEA_{—}1_node_{—}39 (SEQ ID NO:764) according to the present invention is supported by 4 libraries. The number of libraries was determined as previously described. This segment can be found in the following transcript(s): HUMCACH1A_PEA_{—}1_T0 (SEQ ID NO:705), HUMCACH1A_PEA_{—}1_T1 (SEQ ID NO:706), HUMCACH1A_PEA_{—}1_T2 (SEQ ID NO:707), HUMCACH1A_PEA_{—}1_T3 (SEQ ID NO:708), HUMCACH1A_PEA_{—}1_T4 (SEQ ID NO:709), HUMCACH1A_PEA_{—}1_T6 (SEQ ID NO:710), HUMCACH1A_PEA_{—}1_T7 (SEQ ID NO:711), HUMCACH1A_PEA_{—}1_T8 (SEQ ID NO:712), HUMCACH1A_PEA_{—}1_T12 (SEQ ID NO:713), HUMCACH1A_PEA_{—}1_T13 (SEQ ID NO:714), HUMCACH1A_PEA_{—}1_T14 (SEQ ID NO:715), HUMCACH1A_PEA_{—}1_T15 (SEQ ID NO:716) and HUMCACH1A_PEA_{—}1_T16 (SEQ ID NO:717). Table 83 below describes the starting and ending position of this segment on each transcript.

[2798] Segment cluster HUMCACH1A_PEA_{—}1_node_{—}49 (SEQ ID NO:765) according to the present invention is supported by 4 libraries. The number of libraries was determined as previously described. This segment can be found in the following transcript(s): HUMCACH1A_PEA_{—}1_T0 (SEQ ID NO:705), HUMCACH1A_PEA_{—}1_T1 (SEQ ID NO:706) 5, HUMCACH1A_PEA_{—}1_T2 (SEQ ID NO:707), HUMCACH1A_PEA_{—}1_T3 (SEQ ID NO:708), HUMCACH1A_PEA_{—}1_T4 (SEQ ID NO:709), HUMCACH1A_PEA_{—}1_T6 (SEQ ID NO:710), HUMCACH1A_PEA_{—}1_T7 (SEQ ID NO:711), HUMCACH1A_PEA_{—}1_T8 (SEQ ID NO:712), HUMCACH1A_PEA_{—}1_T12 (SEQ ID NO:713), HUMCACH1A_PEA_{—}1_T13 (SEQ ID NO:714), HUMCACH1A_PEA_{—}1_T14 (SEQ ID NO:715), HUMCACH1A_PEA_{—}1_T15 (SEQ ID NO:716) and HUMCACH1A_PEA_{—}1_T16 (SEQ ID NO:717). Table 84 below describes the starting and ending position of this segment on each transcript.

[2799] Segment cluster HUMCACH1A_PEA_{—}1_node_{—}51 (SEQ ID NO:766) according to the present invention is supported by 4 libraries. The number of libraries was determined as previously described. This segment can be found in the following transcript(s): HUMCACH1A_PEA_{—}1_T0 (SEQ ID NO:705), HUMCACH1A_PEA_{—}1_T1 (SEQ ID NO:706), HUMCACH1A_PEA_{—}1_T2 (SEQ ID NO:707), HUMCACH1A_PEA_{—}1_T3 (SEQ ID NO:708), HUMCACH1A_PEA_{—}1_T4 (SEQ ID NO:709), HUMCACH1A_PEA_{—}1_T6 (SEQ ID NO:710), HUMCACH1A_PEA_{—}1_T7 (SEQ ID NO:711), HUMCACH1A_PEA_{—}1_T8 (SEQ ID NO:712), HUMCACH1A_PEA_{—}1_T12 (SEQ ID NO:713), HUMCACH1A_PEA_{—}1_T13 (SEQ ID NO:714), HUMCACH1A_PEA_{—}1_T14 (SEQ ID NO:715), HUMCACH1A_PEA_{—}1_T15 (SEQ ID NO:716) and HUMCACH1A_PEA_{—}1_T16 (SEQ ID NO:717). Table 85 below describes the starting and ending position of this segment on each transcript.

[2800] Segment cluster HUMCACH1A_PEA_{—}1_node_{—}53 (SEQ ID NO:767) according to the present invention is supported by 4 libraries. The number of libraries was determined as previously described. This segment can be found in the following transcript(s): HUMCACH1A_PEA_{—}1_T0 (SEQ ID NO:705), HUMCACH1A_PEA_{—}1_T1 (SEQ ID NO:706) HUMCACH1A_PEA_{—}1_T2 (SEQ ID NO:707), HUMCACH1A_PEA_{—}1_T3 (SEQ ID NO:708), HUMCACH1A_PEA_{—}1_T4 (SEQ ID NO:709), HUMCACH1A_PEA_{—}1_T6 (SEQ ID NO:710), HUMCACH1A_PEA_{—}1_T7(SEQ ID NO:711), HUMCACH1A_PEA_{—}1_T8 (SEQ ID NO:712), HUMCACH1A_PEA_{—}1_T12 (SEQ ID NO:713), HUMCACH1A_PEA_{—}1_T13 (SEQ ID NO:714), HUMCACH1A_PEA_{—}1_T14 (SEQ ID NO:715), HUMCACH1A_PEA_{—}1_T15 (SEQ ID NO:716) and HUMCACH1A_PEA_{—}1_T16 (SEQ ID NO:717). Table 86 below describes the starting and ending position of this segment on each transcript.

[2801] Segment cluster HUMCACH1A_PEA_{—}1_node_{—}58 (SEQ ID NO:768) according to the present invention is supported by 1 libraries. The number of libraries was determined as previously described. This segment can be found in the following transcript(s): HUMCACH1A_PEA_{—}1_T16 (SEQ ID NO:717). Table 87 below describes the starting and ending position of this segment on each transcript.

[2802] Segment cluster HUMCACH1A_PEA_{—}1_node_{—}60 (SEQ ID NO:769) according to the present invention is supported by 4 libraries. The number of libraries was determined as previously described. This segment can be found in the following transcript(s): HUMCACH1A_PEA_{—}1_T0 (SEQ ID NO:705), HUMCACH1A_PEA_{—}1_T1 (SEQ ID NO:706), HUMCACH1A_PEA_{—}1_T2 (SEQ ID NO:707), HUMCACH1A_PEA_{—}1_T3 (SEQ ID NO:708), HUMCACH1A_PEA_{—}1_T4 (SEQ ID NO:709), HUMCACH1A_PEA_{—}1_T6 (SEQ ID NO:710), HUMCACH1A_PEA_{—}1_T7 (SEQ ID NO:711), HUMCACH1A_PEA_{—}1_T8 (SEQ ID NO:712), HUMCACH1A_PEA_{—}1_T12 (SEQ ID NO:713), HUMCACH1A_PEA_{—}1_T13 (SEQ ID NO:714), HUMCACH1A_PEA_{—}1_T14 (SEQ ID NO:715) and HUMCACH1A_PEA_{—}1_T15 (SEQ ID NO:716). Table 88 below describes the starting and ending position of this segment on each transcript.

[2803] Segment cluster HUMCACH1A_PEA_{—}1_node_{—}62 (SEQ ID NO:770) according to the present invention is supported by 2 libraries. The number of libraries was determined as previously described. This segment can be found in the following transcript(s): HUMCACH1A_PEA_{—}1_T0 (SEQ ID NO:705), HUMCACH1A_PEA_{—}1_T1 (SEQ ID NO:706), HUMCACH1A_PEA_{—}1_T2 (SEQ ID NO:707), HUMCACH1A_PEA_{—}1_T3 (SEQ ID NO:708), HUMCACH1A_PEA_{—}1_T4 (SEQ ID NO:709), HUMCACH1A_PEA_{—}1_T6 (SEQ ID NO:710), HUMCACH1A_PEA_{—}1_T7 (SEQ ID NO:711), HUMCACH1A_PEA_{—}1_T8 (SEQ ID NO:712), HUMCACH1A_PEA_{—}1_T12 (SEQ ID NO:713), HUMCACH1A_PEA_{—}1_T13 (SEQ ID NO:714), HUMCACH1A_PEA_{—}1_T14 (SEQ ID NO:715) and HUMCACH1A_PEA_{—}1_T15 (SEQ ID NO:716). Table 89 below describes the starting and ending position of this segment on each transcript.

[2804] Segment cluster HUMCACH1A_PEA_{—}1_node_{—}64 (SEQ ID NO:771) according to the present invention is supported by 2 libraries. The number of libraries was determined as previously described. This segment can be found in the following transcript(s): HUMCACH1A_PEA_{—}1_T0 (SEQ ID NO:705), HUMCACH1A_PEA_{—}1_T1 (SEQ ID NO:706), HUMCACH1A_PEA_{—}1_T2 (SEQ ID NO:707), HUMCACH1A_PEA_{—}1_T3 (SEQ ID NO:708), HUMCACH1A_PEA_{—}1_T4 (SEQ ID NO:709), HUMCACH1A_PEA_{—}1_T6 (SEQ ID NO:710, HUMCACH1A_PEA_{—}1_T7(SEQ ID NO:711), HUMCACH1A_PEA_{—}1_T8 (SEQ ID NO:712), HUMCACH1A_PEA_{—}1_T12 (SEQ ID NO:713), HUMCACH1A_PEA_{—}1_T13 (SEQ ID NO:714), HUMCACH1A_PEA_{—}1_T14 (SEQ ID NO:715) and HUMCACH1A_PEA_{—}1_T15 (SEQ ID NO:716). Table 90 below describes the starting and ending position of this segment on each transcript.

[2805] Segment cluster HUMCACH1A_PEA_{—}1_node_{—}66 (SEQ ID NO:772) according to the present invention is supported by 4 libraries. The number of libraries was determined as previously described. This segment can be found in the following transcript(s): HUMCACH1A_PEA_{—}1_T0 (SEQ ID NO:705), HUMCACH1A_PEA_{—}1_T1 (SEQ ID NO:706) HUMCACH1A_PEA_{—}1_T2 (SEQ ID NO:707), HUMCACH1A_PEA_{—}1_T3 (SEQ ID NO:708), HUMCACH1A_PEA_{—}1_T4 (SEQ ID NO:709), HUMCACH1A_PEA_{—}1_T6 (SEQ ID NO:710), HUMCACH1A_PEA_{—}1_T7 (SEQ ID NO:711), HUMCACH1A_PEA_{—}1_T8 (SEQ ID NO:712), HUMCACH1A_PEA_{—}1_T12 (SEQ ID NO:713), HUMCACH1A_PEA_{—}1_T13 (SEQ ID NO:714), HUMCACH1A_PEA_{—}1_T14 (SEQ ID NO:715) and HUMCACH1A_PEA_{—}1_T15 (SEQ ID NO:716). Table 91 below describes the starting and ending position of this segment on each transcript.

[2806] Segment cluster HUMCACH1A_PEA_{—}1_node_{—}68 (SEQ ID NO:773) according to the present invention is supported by 3 libraries. The number of libraries was determined as previously described. This segment can be found in the following transcript(s): HUMCACH1A_PEA_{—}1_T0 (SEQ ID NO:705), HUMCACH1A_PEA_{—}1_T1 (SEQ ID NO:706), HUMCACH1A_PEA_{—}1_T2 (SEQ ID NO:707), HUMCACH1A_PEA_{—}1_T3 (SEQ ID NO:708), HUMCACH1A_PEA_{—}1_T4 (SEQ ID NO:709), HUMCACH1A_PEA_{—}1_T6 (SEQ ID NO:710), HUMCACH1A_PEA_{—}1_T7 (SEQ ID NO:711), HUMCACH1A_PEA_{—}1_T8 (SEQ ID NO:712), HUMCACH1A_PEA_{—}1_T12 (SEQ ID NO:713), HUMCACH1A_PEA_{—}1_T13 (SEQ ID NO:714), HUMCACH1A_PEA_{—}1_T14 (SEQ ID NO:715) and HUMCACH1A_PEA_{—}1_T15 (SEQ ID NO:716). Table 92 below describes the starting and ending position of this segment on each transcript.

[2807] Segment cluster HUMCACH1A_PEA_{—}1_node_{—}76 (SEQ ID NO:774) according to the present invention is supported by 2 libraries. The number of libraries was determined as previously described. This segment can be found in the following transcript(s): HUMCACH1A_PEA_{—}1_T0 (SEQ ID NO:705), HUMCACH1A_PEA_{—}1_T1 (SEQ ID NO:706) HUMCACH1A_PEA_{—}1_T2 (SEQ ID NO:707), HUMCACH1A_PEA_{—}1_T3 (SEQ ID NO:708), HUMCACH1A_PEA_{—}1_T4 (SEQ ID NO:709), HUMCACH1A_PEA_{—}1_T6 (SEQ ID NO:710), HUMCACH1A_PEA_{—}1_T7(SEQ ID NO:711), HUMCACH1A_PEA_{—}1_T8 (SEQ ID NO:712), HUMCACH1A_PEA_{—}1_T12 (SEQ ID NO:713), HUMCACH1A_PEA_{—}1_T13 (SEQ ID NO:714), HUMCACH1A_PEA_{—}1_T14 (SEQ ID NO:715) and HUMCACH1A_PEA_{—}1_T15 (SEQ ID NO:716). Table 93 below describes the starting and ending position of this segment on each transcript.

[2808] Segment cluster HUMCACH1A_PEA_{—}1_node_{—}77 (SEQ ID NO:775) according to the present invention is supported by 1 libraries. The number of libraries was determined as previously described. This segment can be found in the following transcript(s): HUMCACH1A_PEA_{—}1_T15 (SEQ ID NO:716). Table 94 below describes the starting and ending position of this segment on each transcript.

[2809] Segment cluster HUMCACH1A_PEA_{—}1_node_{—}79 (SEQ ID NO:776) according to the present invention is supported by 1 libraries. The number of libraries was determined as previously described. This segment can be found in the following transcript(s): HUMCACH1A_PEA_{—}1_T0 (SEQ ID NO:705), HUMCACH1A_PEA_{—}1_T1 (SEQ ID NO:706), HUMCACH1A_PEA_{—}1_T2 (SEQ ID NO:707), HUMCACH1A_PEA_{—}1_T3 (SEQ ID NO:708), HUMCACH1A_PEA_{—}1_T4 (SEQ ID NO:709), HUMCACH1A_PEA_{—}1_T6 (SEQ ID NO:710, HUMCACH1A_PEA_{—}1_T7(SEQ ID NO:711), HUMCACH1A_PEA_{—}1_T8 (SEQ ID NO:712), HUMCACH1A_PEA_{—}1_T12 (SEQ ID NO:713), HUMCACH1A_PEA_{—}1_T13 (SEQ ID NO:714) and HUMCACH1A_PEA_{—}1_T14 (SEQ ID NO:715). Table 95 below describes the starting and ending position of this segment on each transcript.

[2810] Segment cluster HUMCACH1A_PEA_{—}1_node_{—}81 (SEQ ID NO:777) according to the present invention is supported by 1 libraries. The number of libraries was determined as previously described. This segment can be found in the following transcript(s): HUMCACH1A_PEA_{—}1_T17 (SEQ ID NO:718). Table 96 below describes the starting and ending position of this segment on each transcript.

[2811] Segment cluster HUMCACH1A_PEA_{—}1_node_{—}84 (SEQ ID NO:778) according to the present invention is supported by 2 libraries. The number of libraries was determined as previously described. This segment can be found in the following transcript(s): HUMCACHLA_PEA_{—}1_T0 (SEQ ID NO:705), HUMCACH1A_PEA_{—}1_T1 (SEQ ID NO:706), HUMCACH1A_PEA_{—}1_T2 (SEQ ID NO:707), HUMCACH1A_PEA_{—}1_T3 (SEQ ID NO:708), HUMCACH1A_PEA_{—}1_T4 (SEQ ID NO:709), HUMCACH1A_PEA_{—}1_T6 (SEQ ID NO:710), HUMCACH1A_PEA_{—}1_T7 (SEQ ID NO:711), HUMCACH1A_PEA_{—}1_T8 (SEQ ID NO:712), HUMCACH1A_PEA_{—}1_T12 (SEQ ID NO:713), HUMCACH1A_PEA_{—}1_T13 (SEQ ID NO:714), HUMCACH1A_PEA_{—}1_T14 (SEQ ID NO:715) and HUMCACH1A_PEA_{—}1_T17 (SEQ ID NO:718). Table 97 below describes the starting and ending position of this segment on each transcript.

[2812] Segment cluster HUMCACH1A_PEA_{—}1_node_{—}88 (SEQ ID NO:779) according to the present invention is supported by 2 libraries. The number of libraries was determined as previously described. This segment can be found in the following transcript(s): HUMCACH1A_PEA_{—}1_T0 (SEQ ID NO:705), HUMCACH1A_PEA_{—}1_T1 (SEQ ID NO:706), HUMCACH1A_PEA_{—}1_T2 (SEQ ID NO:707), HUMCACH1A_PEA_{—}1_T3 (SEQ ID NO:708), HUMCACH1A_PEA_{—}1_T4 (SEQ ID NO:709), HUMCACH1A_PEA_{—}1_T6 (SEQ ID NO:710), HUMCACH1A_PEA_{—}1_T7 (SEQ ID NO:711), HUMCACH1A_PEA_{—}1_T8 (SEQ ID NO:712), HUMCACH1A_PEA_{—}1_T12 (SEQ ID NO:713), HUMCACH1A_PEA_{—}1_T13 (SEQ ID NO:714), HUMCACH1A_PEA_{—}1_T14 (SEQ ID NO:715) and HUMCACH1A_PEA_{—}1_T17 (SEQ ID NO:718). Table 98 below describes the starting and ending position of this segment on each transcript.

[2813] Segment cluster HUMCACH1A_PEA_{—}1_node_{—}90 (SEQ ID NO:780) according to the present invention is supported by 2 libraries. The number of libraries was determined as previously described. This segment can be found in the following transcript(s): HUMCACH1A_PEA_{—}1_T0 (SEQ ID NO:705), HUMCACH1A_PEA_{—}1_T1 (SEQ ID NO:706), HUMCACH1A_PEA_{—}1_T2 (SEQ ID NO:707), HUMCACH1A_PEA_{—}1_T3 (SEQ ID NO:708), HUMCACH1A_PEA_{—}1_T4 (SEQ ID NO:709), HUMCACH1A_PEA_{—}1_T6 (SEQ ID NO:710), HUMCACH1A_PEA_{—}1_T7 (SEQ ID NO:711), HUMCACH1A_PEA_{—}1_T8 (SEQ ID NO:712), HUMCACH1A_PEA_{—}1_T12 (SEQ ID NO:713), HUMCACH1A_PEA_{—}1_T13 (SEQ ID NO:714), HUMCACH1A_PEA_{—}1_T14 (SEQ ID NO:715) and HUMCACH1A_PEA_{—}1_T17 (SEQ ID NO:718). Table 99 below describes the starting and ending position of this segment on each transcript.

[2814] Segment cluster HUMCACH1A_PEA_{—}1_node_{—}96 (SEQ ID NO:781) according to the present invention is supported by 4 libraries. The number of libraries was determined as previously described. This segment can be found in the following transcript(s): HUMCACH1A_PEA_{—}1_T0 (SEQ ID NO:705), HUMCACH1A_PEA_{—}1_T1 (SEQ ID NO:706), HUMCACH1A_PEA_{—}1_T2 (SEQ ID NO:707), HUMCACH1A_PEA_{—}1_T3 (SEQ ID NO:708), HUMCACH1A_PEA_{—}1_T4 (SEQ ID NO:709), HUMCACH1A_PEA_{—}1_T6 (SEQ ID NO:710), HUMCACH1A_PEA_{—}1_T7 (SEQ ID NO:711), HUMCACH1A_PEA_{—}1_T8 (SEQ ID NO:712), HUMCACH1A_PEA_{—}1_T12 (SEQ ID NO:713), HUMCACH1A_PEA_{—}1_T13 (SEQ ID NO:714), HUMCACH1A_PEA_{—}1_T14 (SEQ ID NO:715) and HUMCACH1A_PEA_{—}1_T17 (SEQ ID NO:718). Table 100 below describes the starting and ending position of this segment on each transcript.

[2815] Segment cluster HUMCACH1A_PEA_{—}1_node_{—}98 (SEQ ID NO:782) according to the present invention is supported by 2 libraries. The number of libraries was determined as previously described. This segment can be found in the following transcript(s): HUMCACH1A_PEA_{—}1_T0 (SEQ ID NO:705), HUMCACH1A_PEA_{—}1_T1 (SEQ ID NO:706), HUMCACH1A_PEA_{—}1_T2 (SEQ ID NO:707), HUMCACH1A_PEA_{—}1_T3 (SEQ ID NO:7081, HUMCACH1A_PEA_{—}1_T4 (SEQ ID NO:709), HUMCACH1A_PEA_{—}1_T6 (SEQ ID NO:710), HUMCACH1A_PEA_{—}1_T7(SEQ ID NO:711), HUMCACH1A_PEA_{—}1_T8 (SEQ ID NO:712), HUMCACH1A_PEA_{—}1_T12 (SEQ ID NO:713), HUMCACH1A_PEA_{—}1_T13 (SEQ ID NO:714), HUMCACH1A_PEA_{—}1_T14 (SEQ ID NO:715) and HUMCACH1A_PEA_{—}1_T17 (SEQ ID NO:718). Table 101 below describes the starting and ending position of this segment on each transcript.

[2816] Segment cluster HUMCACH1A_PEA_{—}1_node_{—}100 (SEQ ID NO:783) according to the present invention is supported by 1 libraries. The number of libraries was determined as previously described. This segment can be found in the following transcript(s): HUMCACH1A_PEA_T0 (SEQ ID NO:705), HUMCACH1A_PEA_{—}1_T1 (SEQ ID NO:706), HUMCACH1A_PEA_{—}1_T2 (SEQ ID NO:707), HUMCACH1A_PEA_{—}1_T3 (SEQ ID NO:708), HUMCACH1A_PEA_{—}1_T4 (SEQ ID NO:709), HUMCACH1A_PEA_{—}1_T6 (SEQ ID NO:710), HUMCACH1A_PEA_{—}1_T7 (SEQ ID NO:711), HUMCACH1A_PEA_{—}1_T8 (SEQ ID NO:712), HUMCACH1A_PEA_{—}1_T12 (SEQ ID NO:713), HUMCACH1A_PEA_{—}1_T13 (SEQ ID NO:714), HUMCACH1A_PEA_{—}1_T14 (SEQ ID NO:715) and HUMCACH1A_PEA_{—}1_T17 (SEQ ID NO:718). Table 102 below describes the starting and ending position of this segment on each transcript.

[2817] Segment cluster HUMCACH1A_PEA_{—}1_node_{—}101 (SEQ ID NO:784) according to the present invention is supported by 0 libraries. The number of libraries was determined as previously described. This segment can be found in the following transcript(s): HUMCACH1A_PEA_{—}1_T14 (SEQ ID NO:715). Table 103 below describes the starting and ending position of this segment on each transcript.

[2818] Segment cluster HUMCACH1A_PEA_{—}1_node_{—}107 (SEQ ID NO:785) according to the present invention is supported by 6 libraries. The number of libraries was determined as previously described. This segment can be found in the following transcript(s): HUMCACH1A_PEA_{—}1_T0 (SEQ ID NO:705), HUMCACH1A_PEA_{—}1_T1 (SEQ ID NO:706), HUMCACH1A_PEA_{—}1_T2 (SEQ ID NO:707), HUMCACH1A_PEA_{—}1_T3 (SEQ ID NO:708), HUMCACH1A_PEA_{—}1_T4 (SEQ ID NO:709), HUMCACH1A_PEA_{—}1_T6 (SEQ ID NO:710), HUMCACH1A_PEA_{—}1_T7 (SEQ ID NO:711), HUMCACH1A_PEA_{—}1_T8 (SEQ ID NO:712), HUMCACH1A_PEA_{—}1_T12 (SEQ ID NO:713), HUMCACH1A_PEA_{—}1_T13 (SEQ ID NO:714), HUMCACH1A_PEA_{—}1_T17 (SEQ ID NO:718), HUMCACH1A_PEA_{—}1_T18 (SEQ ID NO:719) and HUMCACH1A_PEA_{—}1_T19 (SEQ ID NO:720). Table 104 below describes the starting and ending position of this segment on each transcript.

[2819] Segment cluster HUMCACH1A_PEA_{—}1_node_{—}111 (SEQ ID NO:786) according to the present invention is supported by 0 libraries. The number of libraries was determined as previously described. This segment can be found in the following transcript(s): HUMCACH1A_PEA_{—}1_T0 (SEQ ID NO:705), HUMCACH1A_PEA_{—}1_T1 (SEQ ID NO:706) HUMCACH1A_PEA_{—}1_T2 (SEQ ID NO:707), HUMCACH1A_PEA_{—}1_T3 (SEQ ID NO:708), HUMCACH1A_PEA_{—}1_T4 (SEQ ID NO:709), HUMCACH1A_PEA_{—}1_T6 (SEQ ID NO:710), HUMCACH1A_PEA_{—}1_T8 (SEQ ID NO:712), HUMCACH1A_PEA_{—}1_T12 (SEQ ID NO:713), HUMCACH1A_PEA_{—}1_T17 (SEQ ID NO:718), HUMCACH1A_PEA_{—}1_T18 (SEQ ID NO:719) and HUMCACH1A_PEA_{—}1_T19 (SEQ ID NO:720). Table 105 below describes the starting and ending position of this segment on each transcript.

[2820] Segment cluster HUMCACH1A_PEA_{—}1_node_{—}117 (SEQ ID NO:787) according to the present invention is supported by 1 libraries. The number of libraries was determined as previously described. This segment can be found in the following transcript(s): HUMCACH1A_PEA_{—}1_T13 (SEQ ID NO:714). Table 106 below describes the starting and ending position of this segment on each transcript.

[2821] Segment cluster HUMCACH1A_PEA_{—}1_node_{—}124 (SEQ ID NO:788) according to the present invention is supported by 18 libraries. The number of libraries was determined as previously described. This segment can be found in the following transcript(s): HUMCACH1A_PEA_{—}1_T0 (SEQ ID NO:705), HUMCACH1A_PEA_{—}1_T1 (SEQ ID NO:706), HUMCACH1A_PEA_{—}1_T2 (SEQ ID NO:707), HUMCACH1A_PEA_{—}1_T3 (SEQ ID NO:708), HUMCACH1A_PEA_{—}1_T4 (SEQ ID NO:709), HUMCACH1A_PEA_{—}1_T6 (SEQ ID NO:710), HUMCACH1A_PEA_{—}1_T7 (SEQ ID NO:711), HUMCACH1A_PEA_{—}1_T8 (SEQ ID NO:712), HUMCACH1A_PEA_{—}1_T12 (SEQ ID NO:713), HUMCACH1A_PEA_{—}1_T17 (SEQ ID NO:718), HUMCACH1A_PEA_{—}1_T18 (SEQ ID NO:719) and HUMCACH1A_PEA_{—}1_T19 (SEQ ID NO:720). Table 107 below describes the starting and ending position of this segment on each transcript.

[2822] Segment cluster HUMCACH1A_PEA_{—}1_node_{—}126 (SEQ ID NO:789) according to the present invention is supported by 9 libraries. The number of libraries was determined as previously described. This segment can be found in the following transcript(s): HUMCACH1A_PEA_{—}1_T0 (SEQ ID NO:705), HUMCACH1A_PEA_{—}1_T1 (SEQ ID NO:706), HUMCACH1A_PEA_{—}1_T6 (SEQ ID NO:710), HUMCACH1A_PEA_{—}1_T7 (SEQ ID NO:711), HUMCACH1A_PEA_{—}1_T8 (SEQ ID NO:712), HUMCACH1A_PEA_{—}1_T12 (SEQ ID NO:713), HUMCACH1A_PEA_{—}1_T17 (SEQ ID NO:718), HUMCACH1A_PEA_{—}1_T18 (SEQ ID NO:719) and HUMCACH1A_PEA_{—}1_T19 (SEQ ID NO:720). Table 108 below describes the starting and ending position of this segment on each transcript.

Variant protein alignment to the previously known protein:

Sequence name: CCAD_HUMAN_V3 (SEQ ID NO:791)

Sequence Documentation:

Alignment of: HUMCACH1A_PEA_{—}1_P7 (SEQ ID NO:796) x CCAD_HUMAN_V3 (SEQ ID NO:791) ••

Alignment segment 1/1:

Alignment:

Sequence name: CCAD_HUMAN (SEQ ID NO:790)

Sequence Documentation:

Alignment of: HUMCACH1A_PEA_{—}1_P13 (SEQ ID NO:802)×CCAD_HUMAN (SEQ ID NO:790) ••

Alignment segment 1/1:

Alignment:

Sequence name: CCAD_HUMAN (SEQ ID NO:790)

Sequence Documentation:

Alignment of: HUMCACH1A_PEA_{—}1_P14 (SEQ ID NO:803)×CCAD_HUMAN (SEQ ID NO:790) ••

Alignment segment 1/1:

Alignment:

Sequence name: CCAD_HUMAN (SEQ ID NO:790)

Sequence Documentation:

Alignment of: HUMCACH1A_PEA_{—}1_P17 (SEQ ID NO:805)×CCAD_HUMAN (SEQ ID NO:790) ••

Alignment segment 1/1:

Alignment:

[2823] Expression of Voltage-dependent L-type calcium channel alpha-1D subunit Calcium channel, L type, alpha-1 polypeptide, isoform 2 transcripts which are detectable by seg 113, 35, 109, 125, in normal, and cancerous colon tissues

[2824] Expression of Voltage-dependent L-type calcium channel alpha-1D subunit Calcium channel, L type, alpha-1 polypeptide, isoform 2 transcripts detectable by or according to segments 113, 35, 109, 125 was measured with oligonucleotide-based micro-arrays. The results of image intensities for each feature were normalized according to the ninetieth percentile of the image intensities of all the features on the chip. Then, feature image intensities for replicates of the same oligonucleotide on the chip and replicates of the same sample were averaged. Outlying results were discarded.

[2825] For every oligonucleotide HUMCACH1A_{—}0_{—}3_{—}14917, HUMCACH1A_{—}0_{—}0_{—}14922, HUMCACH1A_{—}0_{—}0_{—}14924 and HUMCACH1A_{—}0_{—}0_{—}14913 (SEQ ID NOs: 1331, 1332, 1333 and 1334, respectively) the averaged intensity determined for every sample was divided by the averaged intensity of all the normal samples (Sample Nos. 62-66 and 69, Table 1, above, “Tissue samples in testing panel”), to obtain a value of fold up-regulation for each sample relative to the averaged normal samples. These data are presented in a histogram bellow (FIG. 47). As is evident from the histogram, the expression of Voltage-dependent L-type calcium channel alpha-1D subunit Calcium channel, L type, alpha-1 polypeptide, isoform 2 transcripts detectable with the above oligonucleotides in cancer samples was higher than in the normal samples.

[2826] Expression of Voltage-dependent L-type calcium channel alpha-1D subunit Calcium channel, L type, alpha-1 polypeptide, isoform 2

[2827] HUMCACH1A transcripts which are detectable by amplicon as depicted in sequence name HUMCACH1Aseg101 (SEQ ID NO:1337) in normal and cancerous colon tissues

[2828] Expression of Voltage-dependent L-type calcium channel alpha-1D subunit Calcium channel, L type, alpha-1 polypeptide, isoform 2 transcripts detectable by or according to seg101, HUMCACH1A seg101 amplicon (SEQ ID NO:1337) and HUMCACH1Aseg101F (SEQ ID NO:1335), HUMCACH1Aseg101R (SEQ ID NO:1336) primers was measured by real time PCR. In parallel the expression of four housekeeping genes—PBGD (GenBank Accession No. BC019323 (SEQ ID NO:1576); amplicon—PBGD-amplicon, SEQ ID NO:531), HPRT1 (GenBank Accession No. NM_{—}000194 (SEQ ID NO:1577); amplicon—HPRT1-amplicon, SEQ ID NO:612), G6PD (GenBank Accession No. NM_{—}000402 (SEQ ID NO:1578); G6PD amplicon, SEQ ID NO:615), RPS27A (GenBank Accession No. NM_{—}002954 (SEQ ID NO:1579); RPS27A amplicon, SEQ ID NO:1261), was measured similarly. For each RT sample, the expression of the above amplicon was normalized to the geometric mean of the quantities of the housekeeping genes. The normalized quantity of each RT sample was then divided by the median of the quantities of the normal post-mortem (PM) samples (Sample Nos. 41, 52, 62-67, 69-71, Table 1, above, “Tissue samples in testing panel”), to obtain a value of fold up-regulation for each sample relative to median of the normal PM samples.

[2829] FIG. 48 is a histogram showing over expression of the above-indicated Voltage-dependent L-type calcium channel alpha-1D subunit Calcium channel, L type, alpha-1 polypeptide, isoform 2 transcripts in cancerous colon samples relative to the normal samples. The number and percentage of samples that exhibit at least 3 fold over-expression, out of the total number of samples tested is indicated in the bottom.

[2830] As is evident from FIG. 48, the expression of Voltage-dependent L-type calcium channel alpha-1D subunit Calcium channel, L type, alpha-1 polypeptide, isoform 2 transcripts detectable by the above amplicon in cancer samples was significantly higher than in the non-cancerous samples (Sample Nos. 41, 52, 62-67, 69-71, Table 1, “Tissue samples in testing panel”). Notably an over-expression of at least 3 fold was found in 11 out of 37 adenocarcinoma samples,

[2831] Statistical analysis was applied to verify the significance of these results, as described below.

[2832] The P value for the difference in the expression levels of Voltage-dependent L-type calcium channel alpha-1D subunit Calcium channel, L type, alpha-1 polypeptide, isoform 2 transcripts detectable by the above amplicon in colon cancer samples versus the normal tissue samples was determined by T test as 1.02E-03.

[2833] Threshold of 3 fold overexpression was found to differentiate between cancer and normal samples with P value of 3.78E-02 as checked by exact fisher test. The above values demonstrate statistical significance of the results.

[2834] Primer pairs are also optionally and preferably encompassed within the present invention; for example, for the above experiment, the following primer pair was used as a non-limiting illustrative example only of a suitable primer pair: HUMCACH1Aseg101 Fforward primer (SEQ ID NO:1335); and HUMCACH1Aseg101 R reverse primer (SEQ ID NO:1336).

[2835] The present invention also preferably encompasses any amplicon obtained through the use of any suitable primer pair; for example, for the above experiment, the following amplicon was obtained as a non-limiting illustrative example only of a suitable amplicon: HUMCACH1Aseg101(SEQ ID NO:1337).

Description for Cluster HUMCEA

[2836] Cluster HUMCEA features 10 transcript(s) and 47 segment(s) of interest, the names for which are given in Tables 1 and 2, respectively, the sequences themselves are given at the end of the application. The selected protein variants are given in table 3.

[2837] These sequences are variants of the known protein Carcinoembryonic antigen-related cell adhesion molecule 5 precursor (SwissProt accession identifier CEA5_HUMAN; known also according to the synonyms Carcinoembryonic antigen; CEA; Meconium antigen 100; CD66e antigen), SEQ ID NO: 863, referred to herein as the previously known protein.

[2838] The sequence for protein Carcinoembryonic antigen-related cell adhesion molecule 5 precursor (SEQ ID NO:863) is given at the end of the application, as “Carcinoembryonic antigen-related cell adhesion molecule 5 precursor amino acid sequence”. Known polymorphisms for this sequence are as shown in Table 4.

[2839] Protein Carcinoembryonic antigen-related cell adhesion molecule 5 precursor (SEQ ID NO:863) localization is believed to be Attached to the membrane by a GPI-anchor.

[2840] The previously known protein also has the following indication(s) and/or potential therapeutic use(s): Cancer. It has been investigated for clinical/therapeutic use in humans, for example as a target for an antibody or small molecule, and/or as a direct therapeutic; available information related to these investigations is as follows. Potential pharmaceutically related or therapeutically related activity or activities of the previously known protein are as follows: Immunostimulant. A therapeutic role for a protein represented by the cluster has been predicted. The cluster was assigned this field because there was information in the drug database or the public databases (e.g., described herein above) that this protein, or part thereof, is used or can be used for a potential therapeutic indication: Imaging agent; Anticancer; Immunostimulant; Immunoconjugate; Monoclonal antibody, murine; Antisense therapy; antibody.

[2841] The following GO Annotation(s) apply to the previously known protein. The following annotation(s) were found: integral plasma membrane protein; membrane, which are annotation(s) related to Cellular Component.

[2842] The GO assignment relies on information from one or more of the SwissProt/TremB1 Protein knowledgebase, available from <http://www.expasy.ch/sprot/>; or Locuslink, available from <http://www.ncbi.nlm.nih.gov/projects/LocusLink/>.

[2843] Cluster HUMCEA can be used as a diagnostic marker according to overexpression of transcripts of this cluster in cancer. Expression of such transcripts in normal tissues is also given according to the previously described methods. The term “number” in the left hand column of the table and the numbers on the y-axis of the figure below refer to weighted expression of ESTs in each category, as “parts per million” (ratio of the expression of ESTs for a particular cluster to the expression of all ESTs in that category, according to parts per million).

[2844] Overall, the following results were obtained as shown with regard to the histograms in FIG. 49 and Table 5. This cluster is overexpressed (at least at a minimum level) in the following pathological conditions: epithelial malignant tumors, a mixture of malignant tumors from different tissues and pancreas carcinoma.

[2845] For this cluster, at least one oligonucleotide was found to demonstrate overexpression of the cluster, although not of at least one transcript/segment as listed below. Microarray (chip) data is also available for this cluster as follows. Various oligonucleotides were tested for being differentially expressed in various disease conditions, particularly cancer, as previously described. The following oligonucleotides were found to hit this cluster but not other segments/transcripts below, shown in Table 7.

[2846] As noted above, cluster HUMCEA features 10 transcript(s), which were listed in Table 1 above. These transcript(s) encode for protein(s) which are variant(s) of protein Carcinoembryonic antigen-related cell adhesion molecule 5 precursor (SEQ ID NO:863). A description of each variant protein according to the present invention is now provided.

[2847] Variant protein HUMCEA_PEA_{—}1_P4 (SEQ ID NO:864) according to the present invention has an amino acid sequence as given at the end of the application; it is encoded by transcript(s) HUMCEA_PEA_{—}1_T8 (SEQ ID NO:806). An alignment is given to the known protein (Carcinoembryonic antigen-related cell adhesion molecule 5 precursor (SEQ ID NO:863)) at the end of the application. One or more alignments to one or more previously published protein sequences are given at the end of the application. A brief description of the relationship of the variant protein according to the present invention to each such aligned protein is as follows:

[2848] Comparison report between HUMCEA_PEA_{—}1_P4 (SEQ ID NO:864) and CEA5_HUMAN (SEQ ID NO:863):

[2849] 1. An isolated chimeric polypeptide encoding for HUMCEA_PEA_{—}1_P4 (SEQ ID NO:864), comprising a first amino acid sequence being at least 90% homologous to MESPSAPPHRWCIPWQRLLLTASLLTFWNPPTTAKLTIESTPFNVAEGKEVLLLVHNLPQ HLFGYSWYKGERVDGNRQIIGYVIGTQQATPGPAYSGREIIYPNASLLIQNIIQNDTGFYT LHVIKSDLVNEEATGQFRVYPELPKPSISSNNSKPVEDKDAVAFTCEPETQDATYLWWV NNQSLPVSPRLQLSNGNRTLTLFNVTRNDTASYKCETQNPVSARRSDSVILNVL corresponding to amino acids 1-234 of CEA5_HUMAN (SEQ ID NO:863), which also corresponds to amino acids 1-234 of HUMCEA_PEA_{—}1_P4 (SEQ ID NO:864), and a second amino acid sequence being at least 70%, optionally at least 80%, preferably at least 85%, more preferably at least 90% and most preferably at least 95% homologous to a polypeptide having the sequence CEYICSSLAQAASPNPQGQRQDFSVPLRFKYTDPQPWTSRLSVTFCPRKTWADQVLTKN RRGGAASVLGGSGSTPYDGRNR (SEQ ID NO:1475) corresponding to amino acids 235-315 of HUMCEA_PEA_{—}1_P4 (SEQ ID NO:864), wherein said first amino acid sequence and second amino acid sequence are contiguous and in a sequential order.

[2850] 2. An isolated polypeptide encoding for a tail of HUMCEA_PEA_{—}1_P4 (SEQ ID NO:864) comprising a polypeptide being at least 70%, optionally at least about 80%, preferably at least about 85%, more preferably at least about 90% and most preferably at least about 95% homologous to the sequence CEYICSSLAQAASPNPQGQRQDFSVPLRFKYTDPQPWTSRLSVTFCPRKTWADQVLTKN RRGGAASVLGGSGSTPYDGRNR (SEQ ID NO:1475) in HUMCEA_PEA_{—}1_P4 (SEQ ID NO:864).

[2851] The location of the variant protein was determined according to results from a number of different software programs and analyses, including analyses from SignalP and other specialized programs. The variant protein is believed to be located as follows with regard to the cell: secreted. The protein localization is believed to be secreted because both signal-peptide prediction programs predict that this protein has a signal peptide, and neither trans-membrane region prediction program predicts that this protein has a trans-membrane region.

[2852] Variant protein HUMCEA_PEA_{—}1_P4 (SEQ ID NO:864) also has the following non-silent SNPs (Single Nucleotide Polymorphisms) as listed in Table 8, (given according to their position(s) on the amino acid sequence, with the alternative amino acid(s) listed; the last column indicates whether the SNP is known or not; the presence of known SNPs in variant protein HUMCEA_PEA_{—}1_P4 (SEQ ID NO:864) sequence provides support for the deduced sequence of this variant protein according to the present invention).

[2853] The glycosylation sites of variant protein HUMCEA_PEA_{—}1_P4 (SEQ ID NO:864), as compared to the known protein Carcinoembryonic antigen-related cell adhesion molecule 5 precursor (SEQ ID NO:863), are described in Table 9 (given according to their position(s) on the amino acid sequence in the first column; the second column indicates whether the glycosylation site is present in the variant protein; and the last column indicates whether the position is different on the variant protein).

[2854] Variant protein HUMCEA_PEA_{—}1_P4 (SEQ ID NO:864) is encoded by the following transcript(s): HUMCEA_PEA_{—}1_T8 (SEQ ID NO:806), for which the sequence(s) is/are given at the end of the application. The coding portion of transcript HUMCEA_PEA_{—}1_T8 (SEQ ID NO:806) is shown in bold; this coding portion starts at position 115 and ends at position 1059. The transcript also has the following SNPs as listed in Table 10 (given according to their position on the nucleotide sequence, with the alternative nucleic acid listed; the last column indicates whether the SNP is known or not; the presence of known SNPs in variant protein HUMCEA_PEA_{—}1_P4 (SEQ ID NO:864) sequence provides support for the deduced sequence of this variant protein according to the present invention).

[2855] Variant protein HUMCEA_PEA_{—}1_P5 (SEQ ID NO:865) according to the present invention has an amino acid sequence as given at the end of the application; it is encoded by transcript(s) HUMCEA_PEA_{—}1_T9 (SEQ ID NO:807). An alignment is given to the known protein (Carcinoembryonic antigen-related cell adhesion molecule 5 precursor (SEQ ID NO:863)) at the end of the application. One or more alignments to one or more previously published protein sequences are given at the end of the application. A brief description of the relationship of the variant protein according to the present invention to each such aligned protein is as follows:

[2856] Comparison report between HUMCEA_PEA_{—}1_P5 (SEQ ID NO:865) and CEA5_HUMAN (SEQ ID NO:863):

[2857] 1. An isolated chimeric polypeptide encoding for HUMCEA_PEA_{—}1_P5 (SEQ ID NO:865), comprising a first amino acid sequence being at least 90% homologous to MESPSAPPHRWCIPWQRLLLTASLLTFWNPPTTAKLTIESTPFNVAEGKEVLLLVHNLPQ HLFGYSWYKGERVDGNRQIIGYVIGTQQATPGPAYSGREIIYPNASLLIQNIIQNDTGFYT LHVIKSDLVNEEATGQFRVYPELPKPSISSNNSKPVEDKDAVAFTCEPETQDATYLWWV NNQSLPVSPRLQLSNGNRTLTLFNVTRNDTASYKCETQNPVSARRSDSVILNVLYGPDA PTISPLNTSYRSGENLNLSCHAASNPPAQYSWFVNGTFQQSTQELFIPNITVNNSGSYTC QAHNSDTGLNRTTVTTITVYAEPPKPFITSNNSNPVEDEDAVALTCEPEIQNTTYLWWV NNQSLPVSPRLQLSNDNRTLTLLSVTRNDVGPYECGIQNELSVDHSDPVILNVLYGPDD PTISPSYTYYRPGVNLSLSCHAASNPPAQYSWLIDGNIQQHTQELFISNITEKNSGLYTCQ ANNSASGHSRTTVKTITVSAELPKPSISSNNSKPVEDKDAVAFTCEPEAQNTTYLWWVN GQSLPVSPRLQLSNGNRTLTLFNVTRNDARAYVCGIQNSVSANRSDPVTLDVLYGPDTP IISPPDSSYLSGANLNLSCHSASNPSPQYSWRINGIPQQHTQVLFIAKITPNNNGTYACFV SNLATGRNNSIVKSITVS corresponding to amino acids 1-675 of CEA5_HUMAN (SEQ ID NO:863), which also corresponds to amino acids 1-675 of HUMCEA_PEA_{—}1_P5 (SEQ ID NO:865), and a second amino acid sequence being at least 70%, optionally at least 80%, preferably at least 85%, more preferably at least 90% and most preferably at least 95% homologous to a polypeptide having the sequence GKWLPGASASYSGVESIWFSPKSQEDIFFPSLCSMGTRKSQILS (SEQ ID NO:1476) corresponding to amino acids 676-719 of HUMCEA_PEA_{—}1_P5 (SEQ ID NO:865), wherein said first amino acid sequence and second amino acid sequence are contiguous and in a sequential order.

[2858] 2. An isolated polypeptide encoding for a tail of HUMCEA_PEA_{—}1_P5 (SEQ ID NO:865) comprising a polypeptide being at least 70%, optionally at least about 80%, preferably at least about 85%, more preferably at least about 90% and most preferably at least about 95% homologous to the sequence GKWLPGASASYSGVESIWFSPKSQEDIFFPSLCSMGTRKSQILS (SEQ ID NO:1476) in HUMCEA_PEA_{—}1_P5 (SEQ ID NO:865).

[2859] The location of the variant protein was determined according to results from a number of different software programs and analyses, including analyses from SignalP and other specialized programs. The variant protein is believed to be located as follows with regard to the cell: secreted. The protein localization is believed to be secreted because both signal-peptide prediction programs predict that this protein has a signal peptide, and neither trans-membrane region prediction program predicts that this protein has a trans-membrane region.

[2860] Variant protein HUMCEA_PEA_{—}1_P5 (SEQ ID NO:865) also has the following non-silent SNPs (Single Nucleotide Polymorphisms) as listed in Table 11, (given according to their position(s) on the amino acid sequence, with the alternative amino acid(s) listed; the last column indicates whether the SNP is known or not; the presence of known SNPs in variant protein HUMCEA_PEA_{—}1_P5 (SEQ ID NO:865) sequence provides support for the deduced sequence of this variant protein according to the present invention).

[2861] The glycosylation sites of variant protein HUMCEA_PEA_{—}1_P5 (SEQ ID NO:865), as compared to the known protein Carcinoembryonic antigen-related cell adhesion molecule 5 precursor (SEQ ID NO:863), are described in Table 12 (given according to their position(s) on the amino acid sequence in the first column; the second column indicates whether the glycosylation site is present in the variant protein; and the last column indicates whether the position is different on the variant protein).

[2862] Variant protein HUMCEA_PEA_{—}1_P5 (SEQ ID NO:865) is encoded by the following transcript(s): HUMCEA_PEA_{—}1_T9 (SEQ ID NO:807), for which the sequence(s) is/are given at the end of the application. The coding portion of transcript HUMCEA_PEA_{—}1_T9 (SEQ ID NO:807) is shown in bold; this coding portion starts at position 115 and ends at position 2271. The transcript also has the following SNPs as listed in Table 13 (given according to their position on the nucleotide sequence, with the alternative nucleic acid listed; the last column indicates whether the SNP is known or not; the presence of known SNPs in variant protein HUMCEA_PEA_{—}1_P5 (SEQ ID NO:865) sequence provides support for the deduced sequence of this variant protein according to the present invention).

[2863] Variant protein HUMCEA_PEA_{—}1_P7 (SEQ ID NO:866) according to the present invention has an amino acid sequence as given at the end of the application; it is encoded by transcript(s) HUMCEA_PEA_{—}1_T12 (SEQ ID NO:808). An alignment is given to the known protein (Carcinoembryonic antigen-related cell adhesion molecule 5 precursor (SEQ ID NO:863)) at the end of the application. One or more alignments to one or more previously published protein sequences are given at the end of the application. A brief description of the relationship of the variant protein according to the present invention to each such aligned protein is as follows:

[2864] Comparison report between HUMCEA_PEA_{—}1_P7 (SEQ ID NO:866) and CEA5_HUMAN (SEQ ID NO:863):

[2865] 1. An isolated chimeric polypeptide encoding for HUMCEA_PEA_{—}1_P7 (SEQ ID NO:866), comprising a first amino acid sequence being at least 90% homologous to MESPSAPPHRWCIPWQRLLLTASLLTFWNPPTTAKLTIESTPFNVAEGKEVLLLVHNLPQ HLFGYSWYKGERVDGNRQIIGYVIGTQQATPGPAYSGREIIYPNASLLIQNIIQNDTGFYT LHVIKSDLVNEEATGQFRVYPELPKPSISSNNSKPVEDKDAVAFTCEPETQDATYLWWV NNQSLPVSPRLQLSNGNRTLTLFNVTRNDTASYKCETQNPVSARRSDSVILNVLYGPDA PTISPLNTSYRSGENLNLSCHAASNPPAQYSWFVNGTFQQSTQELFIPNITVNNSGSYTC QAHNSDTGLNRTTVTTITVYAEPPKPFITSNNSNPVEDEDAVALTCEPEIQNTTYLWWV NNQSLPVSPRLQLSNDNRTLTLLSVTRNDVGPYECGIQNELSVDHSDPVILNVLYGPDD PTISPSYTYYRPGVNLSLSCHAASNPPAQYSWLIDGNIQQHTQELFISNITEKNSGLYTCQ ANNSASGHSRTTVKTITVSAELPKPSISSNNSKPVEDKDAVAFTCEPEAQNTTYLWWVN GQSLPVSPRLQLSNGNRTLTLFNVTRNDARAYVCGIQNSVSANRSDPVTLDVLYGPDTP IISPPDSSYLSGANLNLSCHSASNPSPQYSWRINGIPQQHTQVLFIAKITPNNNGTYACFV SNLATGRNNSIVKSITV corresponding to amino acids 1-674 of CEA5_HUMAN (SEQ ID NO:863), which also corresponds to amino acids 1-674 of HUMCEA_PEA_{—}1_P7 (SEQ ID NO:866), and a second amino acid sequence being at least 90% homologous to SAGATVGIMIGVLVGVALI corresponding to amino acids 684-702 of CEA5_HUMAN (SEQ ID NO:863), which also corresponds to amino acids 675-693 of HUMCEA_PEA_{—}1_P7 (SEQ ID NO:866), wherein said first amino acid sequence and second amino acid sequence are contiguous and in a sequential order.

[2866] 2. An isolated chimeric polypeptide encoding for an edge portion of HUMCEA_PEA_{—}1_P7 (SEQ ID NO:866), comprising a polypeptide having a length “^{n”}, wherein n is at least about 10 amino acids in length, optionally at least about 20 amino acids in length, preferably at least about 30 amino acids in length, more preferably at least about 40 amino acids in length and most preferably at least about 50 amino acids in length, wherein at least two amino acids comprise VS, having a structure as follows: a sequence starting from any of amino acid numbers 674−x to 674; and ending at any of amino acid numbers 675+((n−2)−x), in which x varies from 0 to n−2.

[2867] The location of the variant protein was determined according to results from a number of different software programs and analyses, including analyses from SignalP and other specialized programs. The variant protein is believed to be located as follows with regard to the cell: membrane. The protein localization is believed to be membrane because of manual inspection of known protein localization and/or gene structure.

[2868] Variant protein HUMCEA_PEA_{—}1_P7 (SEQ ID NO:866) also has the following non-silent SNPs (Single Nucleotide Polymorphisms) as listed in Table 14, (given according to their position(s) on the amino acid sequence, with the alternative amino acid(s) listed; the last column indicates whether the SNP is known or not; the presence of known SNPs in variant protein HUMCEA_PEA_{—}1_P7 (SEQ ID NO:866) sequence provides support for the deduced sequence of this variant protein according to the present invention).

[2869] The glycosylation sites of variant protein HUMCEA_PEA_{—}1_P7 (SEQ ID NO:866), as compared to the known protein Carcinoembryonic antigen-related cell adhesion molecule 5 precursor (SEQ ID NO:863), are described in Table 15 (given according to their position(s) on the amino acid sequence in the first column; the second column indicates whether the glycosylation site is present in the variant protein; and the last column indicates whether the position is different on the variant protein).

[2870] Variant protein HUMCEA_PEA_{—}1_P7 (SEQ ID NO:866) is encoded by the following transcript(s): HUMCEA_PEA_{—}1_T12 (SEQ ID NO:808), for which the sequence(s) is/are given at the end of the application. The coding portion of transcript HUMCEA_PEA_{—}1_T12 (SEQ ID NO:808) is shown in bold; this coding portion starts at position 115 and ends at position 2193. The transcript also has the following SNPs as listed in Table 16 (given according to their position on the nucleotide sequence, with the alternative nucleic acid listed; the last column indicates whether the SNP is known or not; the presence of known SNPs in variant protein HUMCEA_PEA_{—}1_P7 (SEQ ID NO:866) sequence provides support for the deduced sequence of this variant protein according to the present invention).

[2871] Variant protein HUMCEA_PEA_{—}1_P10 (SEQ ID NO:867) according to the present invention has an amino acid sequence as given at the end of the application; it is encoded by transcript(s) HUMCEA_PEA_{—}1_T16 (SEQ ID NO:810). An alignment is given to the known protein (Carcinoembryonic antigen-related cell adhesion molecule 5 precursor (SEQ ID NO:863)) at the end of the application. One or more alignments to one or more previously published protein sequences are given at the end of the application. A brief description of the relationship of the variant protein according to the present invention to each such aligned protein is as follows:

[2872] Comparison report between HUMCEA_PEA_{—}1_P10 (SEQ ID NO:867) and CEA5_HUMAN (SEQ ID NO:863):

[2873] 1. An isolated chimeric polypeptide encoding for HUMCEA_PEA_{—}1_P10 (SEQ ID NO:867), comprising a first amino acid sequence being at least 90% homologous to MESPSAPPHRWCIPWQRLLLTASLLTFWNPPTTAKLTIESTPFNVAEGKEVLLLVHNLPQ HLFGYSWYKGERVDGNRQIIGYVIGTQQATPGPAYSGREIIYPNASLLIQNIIQNDTGFYT LHVIKSDLVNEEATGQFRVYPELPKPSISSNNSKPVEDKDAVAFTCEPETQDATYLWWV NNQSLPVSPRLQLSNGNRTLTLFNVTRNDTASYKCETQNPVSARRSDS corresponding to amino acids 1-228 of CEA5_HUMAN (SEQ ID NO:863), which also corresponds to amino acids 1-228 of HUMCEA_PEA_{—}1_P10 (SEQ ID NO:867), and a second amino acid sequence being at least 90% homologous to VILNVLYGPDDPTISPSYTYYRPGVNLSLSCHAASNPPAQYSWLIDGNIQQHTQELFISNI TEKNSGLYTCQANNSASGHSRTTVKTITVSAELPKPSISSNNSKPVEDKDAVAFTCEPEA QNTTYLWWVNGQSLPVSPRLQLSNGNRTLTLFNVTRNDARAYVCGIQNSVSANRSDPV TLDVLYGPDTPIISPPDSSYLSGANLNLSCHSASNPSPQYSWRINGIPQQHTQVLFIAKITP NNNGTYACFVSNLATGRNNSIVKSITVSASGTSPGLSAGATVGIMIGVLVGVALI corresponding to amino acids 407-702 of CEA5_HUMAN (SEQ ID NO:863), which also corresponds to amino acids 229-524 of HUMCEA_PEA_{—}1_P10 (SEQ ID NO:867), wherein said first amino acid sequence and second amino acid sequence are contiguous and in a sequential order.

[2874] 2. An isolated chimeric polypeptide encoding for an edge portion of HUMCEA_PEA_{—}1_P10 (SEQ ID NO:867), comprising a polypeptide having a length “n”, wherein n is at least about 10 amino acids in length, optionally at least about 20 amino acids in length, preferably at least about 30 amino acids in length, more preferably at least about 40 amino acids in length and most preferably at least about 50 amino acids in length, wherein at least two amino acids comprise SV, having a structure as follows: a sequence starting from any of amino acid numbers 228−x to 228; and ending at any of amino acid numbers 229+((n−2)−x), in which x varies from 0 to n−2.

[2875] The location of the variant protein was determined according to results from a number of different software programs and analyses, including analyses from SignalP and other specialized programs. The variant protein is believed to be located as follows with regard to the cell: secreted. The protein localization is believed to be secreted because both signal-peptide prediction programs predict that this protein has a signal peptide.

[2876] Variant protein HUMCEA_PEA_{—}1_P10 (SEQ ID NO:867) also has the following non-silent SNPs (Single Nucleotide Polymorphisms) as listed in Table 17, (given according to their position(s) on the amino acid sequence, with the alternative amino acid(s) listed; the last column indicates whether the SNP is known or not; the presence of known SNPs in variant protein HUMCEA_PEA_{—}1_P10 (SEQ ID NO:867) sequence provides support for the deduced sequence of this variant protein according to the present invention).

[2877] The glycosylation sites of variant protein HUMCEA_PEA_{—}1_P10 (SEQ ID NO:867), as compared to the known protein Carcinoembryonic antigen-related cell adhesion molecule 5 precursor (SEQ ID NO:863), are described in Table 18 (given according to their position(s) on the amino acid sequence in the first column; the second column indicates whether the glycosylation site is present in the variant protein; and the last column indicates whether the position is different on the variant protein).

[2878] Variant protein HUMCEA_PEA_{—}1_P10 (SEQ ID NO:867) is encoded by the following transcript(s): HUMCEA_PEA_{—}1_T16 (SEQ ID NO:810), for which the sequence(s) is/are given at the end of the application. The coding portion of transcript HUMCEA_PEA_{—}1_T16 (SEQ ID NO:810) is shown in bold; this coding portion starts at position 115 and ends at position 1686. The transcript also has the following SNPs as listed in Table 19 (given according to their position on the nucleotide sequence, with the alternative nucleic acid listed; the last column indicates whether the SNP is known or not; the presence of known SNPs in variant protein HUMCEA_PEA_{—}1_P10 (SEQ ID NO:867) sequence provides support for the deduced sequence of this variant protein according to the present invention).

[2879] Variant protein HUMCEA_PEA_{—}1_P14 (SEQ ID NO:868) according to the present invention has an amino acid sequence as given at the end of the application; it is encoded by transcript(s) HUMCEA_PEA_{—}1_T20 (SEQ ID NO:811). The location of the variant protein was determined according to results from a number of different software programs and analyses, including analyses from SignalP and other specialized programs. The variant protein is believed to be located as follows with regard to the cell: secreted. The protein localization is believed to be secreted because both signal-peptide prediction programs predict that this protein has a signal peptide, and neither trans-membrane region prediction program predicts that this protein has a trans-membrane region.

[2880] Variant protein HUMCEA_PEA_{—}1_P14 (SEQ ID NO:868) also has the following non-NPs silent SNPs (Single Nucleotide Polymorphisms) as listed in Table 20, (given according to their position(s) on the amino acid sequence, with the alternative amino acid(s) listed; the last column indicates whether the SNP is known or not; the presence of known SNPs in variant protein HUMCEA_PEA_{—}1_P14 (SEQ ID NO:868) sequence provides support for the deduced sequence of this variant protein according to the present invention).

[2881] Variant protein HUMCEA_PEA_{—}1_P14 (SEQ ID NO:868) is encoded by the following transcript(s): HUMCEA_PEA_{—}1_T20 (SEQ ID NO:811), for which the sequence(s) is/are given at the end of the application. The coding portion of transcript HUMCEA_PEA_{—}1_T20 (SEQ ID NO:811) is shown in bold; this coding portion starts at position 115 and ends at position 1821. The transcript also has the following SNPs as listed in Table 21 (given according to their position on the nucleotide sequence, with the alternative nucleic acid listed; the last column indicates whether the SNP is known or not; the presence of known SNPs in variant protein HUMCEA_PEA_{—}1_P14 (SEQ ID NO:868) sequence provides support for the deduced sequence of this variant protein according to the present invention).

[2882] Variant protein HUMCEA_PEA_{—}1_P19 (SEQ ID NO:869) according to the present invention has an amino acid sequence as given at the end of the application; it is encoded by transcript(s) HUMCEA_PEA_{—}1_T25 (SEQ ID NO:812). An alignment is given to the known protein (Carcinoembryonic antigen-related cell adhesion molecule 5 precursor (SEQ ID NO:863)) at the end of the application. One or more alignments to one or more previously published protein sequences are given at the end of the application. A brief description of the relationship of the variant protein according to the present invention to each such aligned protein is as follows:

[2883] Comparison report between HUMCEA_PEA_{—}1_P19 (SEQ ID NO:869) and CEA5_HUMAN (SEQ ID NO:863):

[2884] 1. An isolated chimeric polypeptide encoding for HUMCEA_PEA_{—}1_P19 (SEQ ID NO:869), comprising a first amino acid sequence being at least 90% homologous to MESPSAPPHRWCIPWQRLLLTASLLTFWNPPTTAKLTIESTPFNVAEGKEVLLLVHNLPQ HLFGYSWYKGERVDGNRQIIGYVIGTQQATPGPAYSGREIIYPNASLLIQNIIQNDTGFYT LHVIKSDLVNEEATGQFRVYPELPKPSISSNNSKPVEDKDAVAFTCEPETQDATYLWWV NNQSLPVSPRLQLSNGNRTLTLFNVTRNDTASYKCETQNPVSARRSDSVILN corresponding to amino acids 1-232 of CEA5_HUMAN (SEQ ID NO:863), which also corresponds to amino acids 1-232 of HUMCEA_PEA_{—}1_P19 (SEQ ID NO:869), and a second amino acid sequence being at least 90% homologous to VLYGPDTPIISPPDSSYLSGANLNLSCHSASNPSPQYSWRINGIPQQHTQVLFIAKITPNNN GTYACFVSNLATGRNNSIVKSITVSASGTSPGLSAGATVGIMIGVLVGVALI corresponding to amino acids 589-702 of CEA5_HUMAN (SEQ ID NO:863), which also corresponds to amino acids 233-346 of HUMCEA_PEA_{—}1_P19 (SEQ ID NO:869), wherein said first amino acid sequence and second amino acid sequence are contiguous and in a sequential order.

[2885] 2. An isolated chimeric polypeptide encoding for an edge portion of HUMCEA_PEA_{—}1_P19 (SEQ ID NO:869), comprising a polypeptide having a length “n”, wherein n is at least about 10 amino acids in length, optionally at least about 20 amino acids in length, preferably at least about 30 amino acids in length, more preferably at least about 40 amino acids in length and most preferably at least about 50 amino acids in length, wherein at least two amino acids comprise NV, having a structure as follows: a sequence starting from any of amino acid numbers 232−x to 232; and ending at any of amino acid numbers 233+((n−2)−x), in which x varies from 0 to n−2.

[2886] The location of the variant protein was determined according to results from a number of different software programs and analyses, including analyses from SignalP and other specialized programs. The variant protein is believed to be located as follows with regard to the cell: membrane. The protein localization is believed to be membrane because of manual inspection of known protein localization and/or gene structure.

[2887] Variant protein HUMCEA_PEA_{—}1_P19 (SEQ ID NO:869) also has the following non-silent SNPs (Single Nucleotide Polymorphisms) as listed in Table 22, (given according to their position(s) on the amino acid sequence, with the alternative amino acid(s) listed; the last column indicates whether the SNP is known or not; the presence of known SNPs in variant protein HUMCEA_PEA_{—}1_P19 (SEQ ID NO:869) sequence provides support for the deduced sequence of this variant protein according to the present invention).

[2888] The glycosylation sites of variant protein HUMCEA_PEA_{—}1_P19 (SEQ ID NO:869), as compared to the known protein Carcinoembryonic antigen-related cell adhesion molecule 5 precursor (SEQ ID NO:863), are described in Table 23 (given according to their position(s) on the amino acid sequence in the first column; the second column indicates whether the glycosylation site is present in the variant protein; and the last column indicates whether the position is different on the variant protein).

[2889] Variant protein HUMCEA_PEA_{—}1_P19 (SEQ ID NO:869) is encoded by the following transcript(s): HUMCEA_PEA_{—}1_T25 (SEQ ID NO:812), for which the sequence(s) is/are given at the end of the application. The coding portion of transcript HUMCEA_PEA_{—}1_T25 (SEQ ID NO:812) is shown in bold; this coding portion starts at position 115 and ends at position 1152. The transcript also has the following SNPs as listed in Table 24 (given according to their position on the nucleotide sequence, with the alternative nucleic acid listed; the last column indicates whether the SNP is known or not; the presence of known SNPs in variant protein HUMCEA_PEA_{—}1_P19 (SEQ ID NO:869) sequence provides support for the deduced sequence of this variant protein according to the present invention).

[2890] Variant protein HUMCEA_PEA_{—}1_P20 (SEQ ID NO:870) according to the present invention has an amino acid sequence as given at the end of the application; it is encoded by transcript(s) HUMCEA_PEA_{—}1_T26 (SEQ ID NO:813). An alignment is given to the known protein (Carcinoembryonic antigen-related cell adhesion molecule 5 precursor (SEQ ID NO:863)) at the end of the application. One or more alignments to one or more previously published protein sequences are given at the end of the application. A brief description of the relationship of the variant protein according to the present invention to each such aligned protein is as follows:

[2891] Comparison report between HUMCEA_PEA_{—}1_P20 (SEQ ID NO:870) and CEA5_HUMAN (SEQ ID NO:863):

[2892] 1. An isolated chimeric polypeptide encoding for HUMCEA_PEA_{—}1_P20 (SEQ ID NO:870), comprising a first amino acid sequence being at least 90% homologous to MESPSAPPHRWCIPWQRLLLTASLLTFWNPPTTAKLTIESTPFNVAEGKEVLLLVHNLPQ HLFGYSWYKGERVDGNRQIIGYVIGTQQATPGPAYSGREIIYPNASLLIQNIIQNDTGFYT LHVIKSDLVNEEATGQFRVYP corresponding to amino acids 1-142 of CEA5_HUMAN (SEQ ID NO:863), which also corresponds to amino acids 1-142 of HUMCEA_PEA_{—}1_P20 (SEQ ID NO:870), and a second amino acid sequence being at least 90% homologous to ELPKPSISSNNSKPVEDKDAVAFTCEPEAQNTTYLWWVNGQSLPVSPRLQLSNGNRTLT LFNVTRNDARAYVCGIQNSVSANRSDPVTLDVLYGPDTPIISPPDSSYLSGANLNLSCHS ASNPSPQYSWRINGIPQQHTQVLFIAKITPNNNGTYACFVSNLATGRNNSIVKSITVSASG TSPGLSAGATVGIMIGVLVGVALI corresponding to amino acids 499-702 of CEA5_HUMAN (SEQ ID NO:863), which also corresponds to amino acids 143-346 of HUMCEA_PEA_{—}1_P20 (SEQ ID NO:870), wherein said first amino acid sequence and second amino acid sequence are contiguous and in a sequential order.

[2893] 2. An isolated chimeric polypeptide encoding for an edge portion of HUMCEA_PEA_{—}1_P20 (SEQ ID NO:870), comprising a polypeptide having a length “n”, wherein n is at least about 10 amino acids in length, optionally at least about 20 amino acids in length, preferably at least about 30 amino acids in length, more preferably at least about 40 amino acids in length and most preferably at least about 50 amino acids in length, wherein at least two amino acids comprise PE, having a structure as follows: a sequence starting from any of amino acid numbers 142−x to 142; and ending at any of amino acid numbers 143+((n−2)−x), in which x varies from 0 to n−2.

[2894] The location of the variant protein was determined according to results from a number of different software programs and analyses, including analyses from SignalP and other specialized programs. The variant protein is believed to be located as follows with regard to the cell: membrane. The protein localization is believed to be membrane because of manual inspection of known protein localization and/or gene structure.

[2895] Variant protein HUMCEA_PEA_{—}1_P20 (SEQ ID NO:870) also has the following non-silent SNPs (Single Nucleotide Polymorphisms) as listed in Table 25, (given according to their position(s) on the amino acid sequence, with the alternative amino acid(s) listed; the last column indicates whether the SNP is known or not; the presence of known SNPs in variant protein HUMCEA_PEA_{—}1_P20 (SEQ ID NO:870) sequence provides support for the deduced sequence of this variant protein according to the present invention).

[2896] The glycosylation sites of variant protein HUMCEA_PEA_{—}1_P20 (SEQ ID NO:870), as compared to the known protein Carcinoembryonic antigen-related cell adhesion molecule 5 precursor (SEQ ID NO:863), are described in Table 26 (given according to their position(s) on the amino acid sequence in the first column; the second column indicates whether the glycosylation site is present in the variant protein; and the last column indicates whether the position is different on the variant protein).

[2897] Variant protein HUMCEA_PEA_{—}1_P20 (SEQ ID NO:870) is encoded by the following transcript(s): HUMCEA_PEA_{—}1_T26 (SEQ ID NO:813), for which the sequence(s) is/are given at the end of the application. The coding portion of transcript HUMCEA_PEA_{—}1_T26 (SEQ ID NO:813) is shown in bold; this coding portion starts at position 115 and ends at position 1152. The transcript also has the following SNPs as listed in Table 27 (given according to their position on the nucleotide sequence, with the alternative nucleic acid listed; the last column indicates whether the SNP is known or not; the presence of known SNPs in variant protein HUMCEA_PEA_{—}1_P20 (SEQ ID NO:870) sequence provides support for the deduced sequence of this variant protein according to the present invention).

[2898] As noted above, cluster HUMCEA features 47 segment(s), which were listed in Table 2 above and for which the sequence(s) are given at the end of the application. These segment(s) are portions of nucleic acid sequence(s) which are described herein separately because they are of particular interest. A description of each segment according to the present invention is now provided.

[2899] Segment cluster HUMCEA_PEA_{—}1_node_{—}0 (SEQ ID NO:816) according to the present invention is supported by 56 libraries. The number of libraries was determined as previously described. This segment can be found in the following transcript(s): HUMCEA_PEA_{—}1_T8 (SEQ ID NO:806), HUMCEA_PEA_{—}1_T9 (SEQ ID NO:807), HUMCEA_PEA_{—}1_T12 (SEQ ID NO:808), HUMCEA_PEA_{—}1_T16 (SEQ ID NO:810), HUMCEA_PEA_{—}1_T20 (SEQ ID NO:811), HUMCEA_PEA_{—}1_T25 (SEQ ID NO:812) and HUMCEA_PEA_{—}1_T26 (SEQ ID NO:813). Table 28 below describes the starting and ending position of this segment on each transcript.

[2900] Segment cluster HUMCEA_PEA_{—}1_node_{—}2 (SEQ ID NO:817) according to the present invention is supported by 83 libraries. The number of libraries was determined as previously described. This segment can be found in the following transcript(s): HUMCEA_PEA_{—}1_T8 (SEQ ID NO:806), HUMCEA_PEA_{—}1_T9 (SEQ ID NO:807), HUMCEA_PEA_{—}1_T12 (SEQ ID NO:808), HUMCEA_PEA_{—}1_T16 (SEQ ID NO:810), HUMCEA_PEA_{—}1_T20 (SEQ ID NO:811), HUMCEA_PEA_{—}1_T25 (SEQ ID NO:812) and HUMCEA_PEA_{—}1_T26 (SEQ ID NO:813). Table 29 below describes the starting and ending position of this segment on each transcript.

[2901] Segment cluster HUMCEA_PEA_{—}1_node_{—}6 (SEQ ID NO:818) according to the present invention is supported by 8 libraries. The number of libraries was determined as previously described. This segment can be found in the following transcript(s): HUMCEA_PEA_{—}1_T14 (SEQ ID NO:809). Table 30 below describes the starting and ending position of this segment on each transcript.

[2902] Segment cluster HUMCEA_PEA_{—}1_node 11 (SEQ ID NO:819) according to the present invention is supported by 6 libraries. The number of libraries was determined as previously described. This segment can be found in the following transcript(s): HUMCEA_PEA_{—}1_T8 (SEQ ID NO:806). Table 31 below describes the starting and ending position of this segment on each transcript.

[2903] Microarray (chip) data is also available for this segment as follows. As described above with regard to the cluster itself, various oligonucleotides were tested for being differentially expressed in various disease conditions, particularly cancer. The following oligonucleotides were found to hit this segment, shown in Table 32.

[2904] Segment cluster HUMCEA_PEA_{—}1_node_{—}12 (SEQ ID NO:820) according to the present invention is supported by 83 libraries. The number of libraries was determined as previously described. This segment can be found in the following transcript(s): HUMCEA_PEA_{—}1_T8 (SEQ ID NO:806), HUMCEA_PEA_{—}1_T9 (SEQ ID NO:807), HUMCEA_PEA_{—}1_T12 (SEQ ID NO:808), HUMCEA_PEA_{—}1_T14 (SEQ ID NO:809) and HUMCEA_PEA_{—}1_T20 (SEQ ID NO:811). Table 33 below describes the starting and ending position of this segment on each transcript.

[2905] Segment cluster HUMCEA_PEA_{—}1_node_{—}31 (SEQ ID NO:821) according to the present invention is supported by 87 libraries. The number of libraries was determined as previously described. This segment can be found in the following transcript(s): HUMCEA_PEA_{—}1_T8 (SEQ ID NO:806), HUMCEA_PEA_{—}1_T9 (SEQ ID NO:807), HUMCEA_PEA_{—}1_T12 (SEQ ID NO:808), HUMCEA_PEA_{—}1_T14 (SEQ ID NO:809), HUMCEA_PEA_{—}1_T16 (SEQ ID NO:810) and HUMCEA_PEA_{—}1_T20 (SEQ ID NO:811). Table 34 below describes the starting and ending position of this segment on each transcript.

[2906] Segment cluster HUMCEA_PEA_{—}1_node_{—}36 (SEQ ID NO:822) according to the present invention is supported by 94 libraries. The number of libraries was determined as previously described. This segment can be found in the following transcript(s): HUMCEA_PEA_{—}1_T8 (SEQ ID NO:806), HUMCEA_PEA_{—}1_T9 (SEQ ID NO:807), HUMCEA_PEA_{—}1_T12 (SEQ ID NO:808), HUMCEA_PEA_{—}1_T14 (SEQ ID NO:809), HUMCEA_PEA_{—}1_T16 (SEQ ID NO:810) and HUMCEA_PEA_{—}1_T26 (SEQ ID NO:813). Table 35 below describes the starting and ending position of this segment on each transcript.

[2907] Segment cluster HUMCEA_PEA_{—}1_node_{—}42 (SEQ ID NO:823) according to the present invention is supported by 5 libraries. The number of libraries was determined as previously described. This segment can be found in the following transcript(s): HUMCEA_PEA_{—}1_T29 (SEQ ID NO:814). Table 36 below describes the starting and ending position of this segment on each transcript.

[2908] Segment cluster HUMCEA_PEA_{—}1_node_{—}43 (SEQ ID NO:824) according to the present invention is supported by 11 libraries. The number of libraries was determined as previously described. This segment can be found in the following transcript(s): HUMCEA_PEA_{—}1_T29 (SEQ ID NO:814). Table 37 below describes the starting and ending position of this segment on each transcript.

[2909] Segment cluster HUMCEA_PEA_{—}1_node_{—}44 (SEQ ID NO:825) according to the present invention is supported by 112 libraries. The number of libraries was determined as previously described. This segment can be found in the following transcript(s): HUMCEA_PEA_{—}1_T8 (SEQ ID NO:806), HUMCEA_PEA_{—}1_T9 (SEQ ID NO:807), HUMCEA_PEA_{—}1_T12 (SEQ ID NO:808), HUMCEA_PEA_{—}1_T14 (SEQ ID NO:809), HUMCEA_PEA_{—}1_T16 (SEQ ID NO:810), HUMCEA_PEA_{—}1_T25 (SEQ ID NO:812), HUMCEA_PEA_{—}1_T26 (SEQ ID NO:813) and HUMCEA_PEA_{—}1_T29 (SEQ ID NO:814). Table 38 below describes the starting and ending position of this segment on each transcript.

[2910] Segment cluster HUMCEA_PEA_{—}1_node_{—}46 (SEQ ID NO:826) according to the present invention is supported by 15 libraries. The number of libraries was determined as previously described. This segment can be found in the following transcript(s): HUMCEA_PEA_{—}1_T9 (SEQ ID NO:807). Table 39 below describes the starting and ending position of this segment on each transcript.

[2911] Segment cluster HUMCEA_PEA_{—}1_node_{—}48 (SEQ ID NO:827) according to the present invention is supported by 18 libraries. The number of libraries was determined as previously described. This segment can be found in the following transcript(s): HUMCEA_PEA_{—}1_T30 (SEQ ID NO:815). Table 40 below describes the starting and ending position of this segment on each transcript.

[2912] Segment cluster HUMCEA_PEA_{—}1_node_{—}63 (SEQ ID NO:828) according to the present invention is supported by 68 libraries. The number of libraries was determined as previously described. This segment can be found in the following transcript(s): HUMCEA_PEA_{—}1_T8 (SEQ ID NO:806), HUMCEA_PEA_{—}1_T12 (SEQ ID NO:808), HUMCEA_PEA_{—}1_T14 (SEQ ID NO:809), HUMCEA_PEA_{—}1_T16 (SEQ ID NO:810), HUMCEA_PEA_{—}1_T25 (SEQ ID NO:812), HUMCEA_PEA_{—}1_T26 (SEQ ID NO:813), HUMCEA_PEA_{—}1_T29 (SEQ ID NO:814) and HUMCEA_PEA_{—}1_T30 (SEQ ID NO:815). Table 41 below describes the starting and ending position of this segment on each transcript.

[2913] Segment cluster HUMCEA_PEA_{—}1_node_{—}65 (SEQ ID NO:829) according to the present invention is supported by 54 libraries. The number of libraries was determined as previously described. This segment can be found in the following transcript(s): HUMCEA_PEA_{—}1_T8 (SEQ ID NO:806), HUMCEA_PEA_{—}1_T12 (SEQ ID NO:808), HUMCEA_PEA_{—}1_T14 (SEQ ID NO:809), HUMCEA_PEA_{—}1_T16 (SEQ ID NO:810), HUMCEA_PEA_{—}1_T25 (SEQ ID NO:812), HUMCEA_PEA_{—}1_T26 (SEQ ID NO:813), HUMCEA_PEA_{—}1_T29 (SEQ ID NO:814) and HUMCEA_PEA_{—}1_T30 (SEQ ID NO:815). Table 42 below describes the starting and ending position of this segment on each transcript.

[2914] Segment cluster HUMCEA_PEA_{—}1_node_{—}67 (SEQ ID NO:830) according to the present invention is supported by 2 libraries. The number of libraries was determined as previously described. This segment can be found in the following transcript(s): HUMCEA_PEA_{—}1_T20 (SEQ ID NO:811). Table 43 below describes the starting and ending position of this segment on each transcript.

[2915] According to an optional embodiment of the present invention, short segments related to the above cluster are also provided. These segments are up to about 120 bp in length, and so are included in a separate description.

[2916] Segment cluster HUMCEA_PEA_{—}1_node_{—}3 (SEQ ID NO:831) according to the present invention is supported by 67 libraries. The number of libraries was determined as previously described. This segment can be found in the following transcript(s): HUMCEA_PEA_{—}1_T8 (SEQ ID NO:806), HUMCEA_PEA_{—}1_T9 (SEQ ID NO:807), HUMCEA_PEA_{—}1_T12 (SEQ ID NO:808), HUMCEA_PEA_{—}1_T16 (SEQ ID NO:810), HUMCEA_PEA_{—}1_T20 (SEQ ID NO:811), HUMCEA_PEA_{—}1_T25 (SEQ ID NO:812) and HUMCEA_PEA_{—}1_T26 (SEQ ID NO:813). Table 44 below describes the starting and ending position of this segment on each transcript.

[2917] Segment cluster HUMCEA_PEA_{—}1_node_{—}7 (SEQ ID NO:832) according to the present invention is supported by 73 libraries. The number of libraries was determined as previously described. This segment can be found in the following transcript(s): HUMCEA_PEA_{—}1_T8 (SEQ ID NO:806), HUMCEA_PEA_{—}1_T9 (SEQ ID NO:807), HUMCEA_PEA_{—}1_T12 (SEQ ID NO:808), HUMCEA_PEA_{—}1_T14 (SEQ ID NO:809), HUMCEA_PEA_{—}1_T16 (SEQ ID NO:810), HUMCEA_PEA_{—}1_T20 (SEQ ID NO:811) and HUMCEA_PEA_{—}1_T25 (SEQ ID NO:812). Table 45 below describes the starting and ending position of this segment on each transcript.

[2918] Segment cluster HUMCEA_PEA_{—}1_node_{—}8 (SEQ ID NO:833) according to the present invention is supported by 67 libraries. The number of libraries was determined as previously described. This segment can be found in the following transcript(s): HUMCEA_PEA_{—}1_T8 (SEQ ID NO:806), HUMCEA_PEA_{—}1_T9 (SEQ ID NO:807), HUMCEA_PEA_{—}1_T12 (SEQ ID NO:808), HUMCEA_PEA_{—}1_T14 (SEQ ID NO:809), HUMCEA_PEA_{—}1_T16 (SEQ ID NO:810), HUMCEA_PEA_{—}1_T20 (SEQ ID NO:811) and HUMCEA_PEA_{—}1_T25 (SEQ ID NO:812). Table 46 below describes the starting and ending position of this segment on each transcript.

[2919] Segment cluster HUMCEA_PEA_{—}1_node_{—}9 (SEQ ID NO:834) according to the present invention is supported by 71 libraries. The number of libraries was determined as previously described. This segment can be found in the following transcript(s): HUMCEA_PEA_{—}1_T8 (SEQ ID NO:806), HUMCEA_PEA_{—}1_T9 (SEQ ID NO:807), HUMCEA_PEA_{—}1_T12 (SEQ ID NO:808), HUMCEA_PEA_{—}1_T14 (SEQ ID NO:809), HUMCEA_PEA_{—}1_T16 (SEQ ID NO:810), HUMCEA_PEA_{—}1_T20 (SEQ ID NO:811) and HUMCEA_PEA_{—}1_T25 (SEQ ID NO:812). Table 47 below describes the starting and ending position of this segment on each transcript.

[2920] Segment cluster HUMCEA_PEA_{—}1_node_{—}10 (SEQ ID NO:835) according to the present invention is supported by 67 libraries. The number of libraries was determined as previously described. This segment can be found in the following transcript(s): HUMCEA_PEA_{—}1_T8 (SEQ ID NO:806), HUMCEA_PEA_{—}1_T9 (SEQ ID NO:807), HUMCEA_PEA_{—}1_T12 (SEQ ID NO:808), HUMCEA_PEA_{—}1_T14 (SEQ ID NO:809), HUMCEA_PEA_{—}1_T16 (SEQ ID NO:810), HUMCEA_PEA_{—}1_T20 (SEQ ID NO:811) and HUMCEA_PEA_{—}1_T25 (SEQ ID NO:812). Table 48 below describes the starting and ending position of this segment on each transcript.

[2921] Segment cluster HUMCEA_PEA_{—}1_node_{—}15 (SEQ ID NO:836) according to the present invention can be found in the following transcript(s): HUMCEA_PEA_{—}1_T8 (SEQ ID NO:806) 5, HUMCEA_PEA_{—}1_T9 (SEQ ID NO:807), HUMCEA_PEA_{—}1_T12 (SEQ ID NO:808), HUMCEA_PEA_{—}1_T14 (SEQ ID NO:809) and HUMCEA_PEA_{—}1_T20 (SEQ ID NO:811). Table 49 below describes the starting and ending position of this segment on each transcript.

[2922] Segment cluster HUMCEA_PEA_{—}1_node_{—}16 (SEQ ID NO:837) according to the present invention can be found in the following transcript(s): HUMCEA_PEA_{—}1_T8 (SEQ ID NO:806) HUMCEA_PEA_{—}1_T9 (SEQ ID NO:807), HUMCEA_PEA_{—}1_T12 (SEQ ID NO:808), HUMCEA_PEA_{—}1_T14 (SEQ ID NO:809) and HUMCEA_PEA_{—}1_T20 (SEQ ID NO:811). Table 50 below describes the starting and ending position of this segment on each transcript.

[2923] Segment cluster HUMCEA_PEA_{—}1_node_{—}17 (SEQ ID NO:838) according to the present invention can be found in the following transcript(s): HUMCEA_PEA_{—}1_T8 (SEQ ID NO:806), HUMCEA_PEA_{—}1_T9 (SEQ ID NO:807), HUMCEA_PEA_{—}1_T12 (SEQ ID NO:808), HUMCEA_PEA_{—}1_T14 (SEQ ID NO:809) and HUMCEA_PEA_{—}1_T20 (SEQ ID NO:811). Table 51 below describes the starting and ending position of this segment on each transcript.

[2924] Segment cluster HUMCEA_PEA_{—}1_node_{—}18 (SEQ ID NO:839) according to the present invention can be found in the following transcript(s): HUMCEA_PEA_{—}1_T8 (SEQ ID NO:806) 5, HUMCEA_PEA_{—}1_T9 (SEQ ID NO:807), HUMCEA_PEA_{—}1_T12 (SEQ ID NO:808), HUMCEA_PEA_{—}1_T14 (SEQ ID NO:809) and HUMCEA_PEA_{—}1_T20 (SEQ ID NO:811). Table 52 below describes the starting and ending position of this segment on each transcript.

[2925] Segment cluster HUMCEA_PEA_{—}1_node_{—}19 (SEQ ID NO:840) according to the present invention is supported by 69 libraries. The number of libraries was determined as previously described. This segment can be found in the following transcript(s): HUMCEA_PEA_{—}1_T8 (SEQ ID NO:806), HUMCEA_PEA_{—}1_T9 (SEQ ID NO:807), HUMCEA_PEA_{—}1_T12 (SEQ ID NO:808), HUMCEA_PEA_{—}1_T14 (SEQ ID NO:809) and HUMCEA_PEA_{—}1_T20 (SEQ ID NO:811). Table 53 below describes the starting and ending position of this segment on each transcript.

[2926] Segment cluster HUMCEA_PEA_{—}1_node_{—}20 (SEQ ID NO:841) according to the present invention can be found in the following transcript(s): HUMCEA_PEA_{—}1_T8 (SEQ ID NO:806) HUMCEA_PEA_{—}1_T9 (SEQ ID NO:807), HUMCEA_PEA_{—}1_T12 (SEQ ID NO:808), HUMCEA_PEA_{—}1_T14 (SEQ ID NO:809) and HUMCEA_PEA_{—}1_T20 (SEQ ID NO:811). Table 54 below describes the starting and ending position of this segment on each transcript.

[2927] Segment cluster HUMCEA_PEA_{—}1_node_{—}21 (SEQ ID NO:842) according to the present invention can be found in the following transcript(s): HUMCEA_PEA_{—}1_T8 (SEQ ID NO:806) 5, HUMCEA_PEA_{—}1_T9 (SEQ ID NO:807), HUMCEA_PEA_{—}1_T12 (SEQ ID NO:808), HUMCEA_PEA_{—}1_T14 (SEQ ID NO:809) and HUMCEA_PEA_{—}1_T20 (SEQ ID NO:811). Table 55 below describes the starting and ending position of this segment on each transcript.

[2928] Segment cluster HUMCEA_PEA_{—}1_node_{—}22 (SEQ ID NO:843) according to the present invention is supported by 77 libraries. The number of libraries was determined as previously described. This segment can be found in the following transcript(s): HUMCEA_PEA_{—}1_T8 (SEQ ID NO:806), HUMCEA_PEA_{—}1_T9 (SEQ ID NO:807), HUMCEA_PEA_{—}1_T12 (SEQ ID NO:808), HUMCEA_PEA_{—}1_T14 (SEQ ID NO:809) and HUMCEA_PEA_{—}1_T20 (SEQ ID NO:811). Table 56 below describes the starting and ending position of this segment on each transcript.

[2929] Segment cluster HUMCEA_PEA_{—}1_node_{—}23 (SEQ ID NO:844) according to the present invention is supported by 72 libraries. The number of libraries was determined as previously described. This segment can be found in the following transcript(s): HUMCEA_PEA_{—}1_T8 (SEQ ID NO:806), HUMCEA_PEA_{—}1_T9 (SEQ ID NO:807), HUMCEA_PEA_{—}1_T12 (SEQ ID NO:808), HUMCEA_PEA_{—}1_T14 (SEQ ID NO:809) and HUMCEA_PEA_{—}1_T20 (SEQ ID NO:811). Table 57 below describes the starting and ending position of this segment on each transcript.

[2930] Segment cluster HUMCEA_PEA_{—}1_node_{—}24 (SEQ ID NO:845) according to the present invention can be found in the following transcript(s): HUMCEA_PEA_{—}1_T8 (SEQ ID NO:806), HUMCEA_PEA_{—}1_T9 (SEQ ID NO:807), HUMCEA_PEA_{—}1_T12 (SEQ ID NO:808), HUMCEA_PEA_{—}1_T14 (SEQ ID NO:809) and HUMCEA_PEA_{—}1_T20 (SEQ ID NO:811). Table 58 below describes the starting and ending position of this segment on each transcript.

[2931] Segment cluster HUMCEA_PEA_{—}1_node_{—}27 (SEQ ID NO:846) according to the present invention can be found in the following transcript(s): HUMCEA_PEA_{—}1_T8 (SEQ ID NO:806) 5, HUMCEA_PEA_{—}1_T9 (SEQ ID NO:807), HUMCEA_PEA_{—}1_T12 (SEQ ID NO:808), HUMCEA_PEA_{—}1_T14 (SEQ ID NO:809), HUMCEA_PEA_{—}1_T16 (SEQ ID NO:810) and HUMCEA_PEA_{—}1_T20 (SEQ ID NO:811). Table 59 below describes the starting and ending position of this segment on each transcript.

[2932] Segment cluster HUMCEA_PEA_{—}1_node_{—}29 (SEQ ID NO:847) according to the present invention can be found in the following transcript(s): HUMCEA_PEA_{—}1_T8 (SEQ ID NO:806), HUMCEA_PEA_{—}1_T9 (SEQ ID NO:807), HUMCEA_PEA_{—}1_T12 (SEQ ID NO:808), HUMCEA_PEA_{—}1_T14 (SEQ ID NO:809), HUMCEA_PEA_{—}1_T16 (SEQ ID NO:810) and HUMCEA_PEA_{—}1_T20 (SEQ ID NO:811). Table 60 below describes the starting and ending position of this segment on each transcript.

[2933] Segment cluster HUMCEA_PEA_{—}1_node_{—}30 (SEQ ID NO:848) according to the present invention is supported by 67 libraries. The number of libraries was determined as previously described. This segment can be found in the following transcript(s): HUMCEA_PEA_{—}1_T8 (SEQ ID NO:806), HUMCEA_PEA_{—}1_T9 (SEQ ID NO:807), HUMCEA_PEA_{—}1_T12 (SEQ ID NO:808), HUMCEA_PEA_{—}1_T14 (SEQ ID NO:809), HUMCEA_PEA_{—}1_T16 (SEQ ID NO:810) and HUMCEA_PEA_{—}1_T20 (SEQ ID NO:811). Table 61 below describes the starting and ending position of this segment on each transcript.

[2934] Segment cluster HUMCEA_PEA_{—}1_node_{—}33 (SEQ ID NO:849) according to the present invention can be found in the following transcript(s): HUMCEA_PEA_{—}1_T8 (SEQ ID NO:806) HUMCEA_PEA_{—}1_T9 (SEQ ID NO:807), HUMCEA_PEA_{—}1_T12 (SEQ ID NO:808), HUMCEA_PEA_{—}1_T14 (SEQ ID NO:809), HUMCEA_PEA_{—}1_T16 (SEQ ID NO:810) and HUMCEA_PEA_{—}1_T26 (SEQ ID NO:813). Table 62 below describes the starting and ending position of this segment on each transcript.

[2935] Segment cluster HUMCEA_PEA_{—}1_node_{—}34 (SEQ ID NO:850) according to the present invention is supported by 80 libraries. The number of libraries was determined as previously described. This segment can be found in the following transcript(s): HUMCEA_PEA_{—}1_T8 (SEQ ID NO:806), HUMCEA_PEA_{—}1_T9 (SEQ ID NO:807), HUMCEA_PEA_{—}1_T12 (SEQ ID NO:808), HUMCEA_PEA_{—}1_T14 (SEQ ID NO:809), HUMCEA_PEA_{—}1_T16 (SEQ ID NO:810) and HUMCEA_PEA_{—}1_T26 (SEQ ID NO:813). Table 63 below describes the starting and ending position of this segment on each transcript.

[2936] Segment cluster HUMCEA_PEA_{—}1_node_{—}35 (SEQ ID NO:851) according to the present invention is supported by 75 libraries. The number of libraries was determined as previously described. This segment can be found in the following transcript(s): HUMCEA_PEA_{—}1_T8 (SEQ ID NO:806), HUMCEA_PEA_{—}1_T9 (SEQ ID NO:807), HUMCEA_PEA_{—}1_T12 (SEQ ID NO:808), HUMCEA_PEA_{—}1_T14 (SEQ ID NO:809), HUMCEA_PEA_{—}1_T16 (SEQ ID NO:810) and HUMCEA_PEA_{—}1_T26 (SEQ ID NO:813). Table 64 below describes the starting and ending position of this segment on each transcript.

[2937] Segment cluster HUMCEA_PEA_{—}1_node_{—}45 (SEQ ID NO:852) according to the present invention is supported by 9 libraries. The number of libraries was determined as previously described. This segment can be found in the following transcript(s): HUMCEA_PEA_{—}1_T9 (SEQ ID NO:807). Table 65 below describes the starting and ending position of this segment on each transcript.

[2938] Segment cluster HUMCEA_PEA_{—}1_node_{—}49 (SEQ ID NO:853) according to the present invention can be found in the following transcript(s): HUMCEA_PEA_{—}1_T30 (SEQ ID NO:815). Table 66 below describes the starting and ending position of this segment on each transcript.

[2939] Segment cluster HUMCEA_PEA_{—}1_node_{—}50 (SEQ ID NO:854) according to the present invention is supported by 64 libraries. The number of libraries was determined as previously described. This segment can be found in the following transcript(s): HUMCEA_PEA_{—}1_T8 (SEQ ID NO:806), HUMCEA_PEA_{—}1_T14 (SEQ ID NO:809), HUMCEA_PEA_{—}1_T16 (SEQ ID NO:810), HUMCEA_PEA_{—}1_T25 (SEQ ID NO:812), HUMCEA_PEA_{—}1_T26 (SEQ ID NO:813), HUMCEA_PEA_{—}1_T29 (SEQ ID NO:814) and HUMCEA_PEA_{—}1_T30 (SEQ ID NO:815). Table 67 below describes the starting and ending position of this segment on each transcript.

[2940] Segment cluster HUMCEA_PEA_{—}1_node_{—}51 (SEQ ID NO:855) according to the present invention is supported by 88 libraries. The number of libraries was determined as previously described. This segment can be found in the following transcript(s): HUMCEA_PEA_{—}1_T8 (SEQ ID NO:806), HUMCEA_PEA_{—}1_T12 (SEQ ID NO:808), HUMCEA_PEA_{—}1_T14 (SEQ ID NO:809), HUMCEA_PEA_{—}1_T16 (SEQ ID NO:810), HUMCEA_PEA_{—}1_T25 (SEQ ID NO:812), HUMCEA_PEA_{—}1_T26 (SEQ ID NO:813), HUMCEA_PEA_{—}1_T29 (SEQ ID NO:814) and HUMCEA_PEA_{—}1_T30 (SEQ ID NO:815). Table 68 below describes the starting and ending position of this segment on each transcript.

[2941] Segment cluster HUMCEA_PEA_{—}1_node_{—}56 (SEQ ID NO:856) according to the present invention is supported by 75 libraries. The number of libraries was determined as previously described. This segment can be found in the following transcript(s): HUMCEA_PEA_{—}1_T8 (SEQ ID NO:806), HUMCEA_PEA_{—}1_T12 (SEQ ID NO:808), HUMCEA_PEA_{—}1_T14 (SEQ ID NO:809), HUMCEA_PEA_{—}1_T16 (SEQ ID NO:810), HUMCEA_PEA_{—}1_T25 (SEQ ID NO:812), HUMCEA_PEA_{—}1_T26 (SEQ ID NO:813), HUMCEA_PEA_{—}1_T29 (SEQ ID NO:814) and HUMCEA_PEA_{—}1_T30 (SEQ ID NO:815). Table 69 below describes the starting and ending position of this segment on each transcript.

[2942] Segment cluster HUMCEA_PEA_{—}1_node_{—}57 (SEQ ID NO:857) according to the present invention is supported by 82 libraries. The number of libraries was determined as previously described. This segment can be found in the following transcript(s): HUMCEA_PEA_{—}1_T8 (SEQ ID NO:806), HUMCEA_PEA_{—}1_T12 (SEQ ID NO:808), HUMCEA_PEA_{—}1_T14 (SEQ ID NO:809), HUMCEA_PEA_{—}1_T16 (SEQ ID NO:810), HUMCEA_PEA_{—}1_T25 (SEQ ID NO:812), HUMCEA_PEA_{—}1_T26 (SEQ ID NO:813), HUMCEA_PEA_{—}1_T29 (SEQ ID NO:814) and HUMCEA_PEA_{—}1_T30 (SEQ ID NO:815). Table 70 below describes the starting and ending position of this segment on each transcript.

[2943] Segment cluster HUMCEA_PEA_{—}1_node_{—}58 (SEQ ID NO:858) according to the present invention is supported by 63 libraries. The number of libraries was determined as previously described. This segment can be found in the following transcript(s): HUMCEA_PEA_{—}1_T8 (SEQ ID NO:806), HUMCEA_PEA_{—}1_T12 (SEQ ID NO:808), HUMCEA_PEA_{—}1_T14 (SEQ ID NO:809), HUMCEA_PEA_{—}1_T16 (SEQ ID NO:810), HUMCEA_PEA_{—}1_T25 (SEQ ID NO:812), HUMCEA_PEA_{—}1_T26 (SEQ ID NO:813), HUMCEA_PEA_{—}1_T29 (SEQ ID NO:814) and HUMCEA_PEA_{—}1_T30 (SEQ ID NO:815). Table 71 below describes the starting and ending position of this segment on each transcript.

[2944] Segment cluster HUMCEA_PEA_{—}1_node_{—}60 (SEQ ID NO:859) according to the present invention is supported by 55 libraries. The number of libraries was determined as previously described. This segment can be found in the following transcript(s): HUMCEA_PEA_{—}1_T8 (SEQ ID NO:806), HUMCEA_PEA_{—}1_T12 (SEQ ID NO:808), HUMCEA_PEA_{—}1_T14 (SEQ ID NO:809), HUMCEA_PEA_{—}1_T16 (SEQ ID NO:810), HUMCEA_PEA_{—}1_T25 (SEQ ID NO:812), HUMCEA_PEA_{—}1_T26 (SEQ ID NO:813), HUMCEA_PEA_{—}1_T29 (SEQ ID NO:814) and HUMCEA_PEA_{—}1_T30 (SEQ ID NO:815). Table 72 below describes the starting and ending position of this segment on each transcript.

[2945] Segment cluster HUMCEA_PEA_{—}1_node_{—}61 (SEQ ID NO:860) according to the present invention can be found in the following transcript(s): HUMCEA_PEA_{—}1_T8 (SEQ ID NO:806) 5, HUMCEA_PEA_{—}1_T12 (SEQ ID NO:808), HUMCEA_PEA_{—}1_T14 (SEQ ID NO:809), HUMCEA_PEA_{—}1_T16 (SEQ ID NO:810), HUMCEA_PEA_{—}1_T25 (SEQ ID NO:812), HUMCEA_PEA_{—}1_T26 (SEQ ID NO:813), HUMCEA_PEA_{—}1_T29 (SEQ ID NO:814) and HUMCEA_PEA_{—}1_T30 (SEQ ID NO:815). Table 73 below describes the starting and ending position of this segment on each transcript.

[2946] Segment cluster HUMCEA_PEA_{—}1_node_{—}62 (SEQ ID NO:861) according to the present invention is supported by 60 libraries. The number of libraries was determined as previously described. This segment can be found in the following transcript(s): HUMCEA_PEA_{—}1_T8 (SEQ ID NO:806), HUMCEA_PEA_{—}1_T12 (SEQ ID NO:808), HUMCEA_PEA_{—}1_T14 (SEQ ID NO:809), HUMCEA_PEA_{—}1_T16 (SEQ ID NO:810), HUMCEA_PEA_{—}1_T25 (SEQ ID NO:812), HUMCEA_PEA_{—}1_T26 (SEQ ID NO:813), HUMCEA_PEA_{—}1_T29 (SEQ ID NO:814) and HUMCEA_PEA_{—}1_T30 (SEQ ID NO:815). Table 74 below describes the starting and ending position of this segment on each transcript.

[2947] Segment cluster HUMCEA_PEA_{—}1_node_{—}64 (SEQ ID NO:862) according to the present invention is supported by 45 libraries. The number of libraries was determined as previously described. This segment can be found in the following transcript(s): HUMCEA_PEA_{—}1_T8 (SEQ ID NO:806), HUMCEA_PEA_{—}1_T12 (SEQ ID NO:808), HUMCEA_PEA_{—}1_T14 (SEQ ID NO:809), HUMCEA_PEA_{—}1_T16 (SEQ ID NO:810), HUMCEA_PEA_{—}1_T25 (SEQ ID NO:812), HUMCEA_PEA_{—}1_T26 (SEQ ID NO:813), HUMCEA_PEA_{—}1_T29 (SEQ ID NO:814) and HUMCEA_PEA_{—}1_T30 (SEQ ID NO:815). Table 75 below describes the starting and ending position of this segment on each transcript.

Variant protein alignment to the previously known protein:

Sequence name: CEA5_HUMAN (SEQ ID NO:863)

Sequence Documentation:

Alignment of: HUMCEA_PEA_{—}1_P4 (SEQ ID NO:864)×CEA5_HUMAN (SEQ ID NO:863) ••

Alignment segment 1/1:

Alignment:

Sequence name: CEA5_HUMAN (SEQ ID NO:863)

Sequence Documentation:

Alignment of: HUMCEA_PEA_{—}1_P5 (SEQ ID NO:865)×CEA5_HUMAN (SEQ ID NO:863) ••

Alignment segment 1/1:

Alignment:

Sequence name: CEA5_HUMAN (SEQ ID NO:863)

Sequence Documentation:

Alignment of: HUMCEA_PEA_{—}1_P7 (SEQ ID NO:866)×CEA5_HUMAN (SEQ ID NO:863) ••

Alignment segment 1/1:

Alignment:

Sequence name: CEA5_HUMAN (SEQ ID NO:863)

Sequence Documentation:

Alignment of: HUMCEA_PEA_{—}1_P10 (SEQ ID NO:867)×CEA5_HUMAN (SEQ ID NO:863).

Alignment segment 1/1:

Alignment:

Sequence name: CEA5_HUMAN (SEQ ID NO:863)

Sequence Documentation:

Alignment of: HUMCEA_PEA_{—}1_P19 (SEQ ID NO:869)×CEA5_HUMAN (SEQ ID NO:863) ••

Alignment segment 1/1:

Alignment:

Sequence name: CEA5_HUMAN (SEQ ID NO:863)

Sequence Documentation:

Alignment of: HUMCEA_PEA_{—}1_P20 (SEQ ID NO:870)×CEA5_HUMAN (SEQ ID NO:863) ••

Alignment segment 1/1:

Alignment:

[2948] Expression of Carcinoembryonic antigen-related cell adhesion molecule 5 transcripts which are detectable by seg12 and seg9, in normal, and cancerous colon tissues

[2949] Expression of Carcinoembryonic antigen-related cell adhesion molecule 5 transcripts detectable by or according to seg12 (SEQ ID NO:1338) and seg9 (SEQ ID NO:1339), was measured with oligonucleotide-based micro-arrays. The results of image intensities for each feature were normalized according to the ninetieth percentile of the image intensities of all the features on the chip. Then, feature image intensities for replicates of the same oligonucleotide on the chip and replicates of the same sample were averaged. Outlying results were discarded.

[2950] For every oligonucleotide HUMCEA_{—}0_{—}0_{—}96 (seg12, SEQ ID NO:1338) and HUMCEA_{—}0_{—}0_{—}15168 (seg9, SEQ ID NO:1339) the averaged intensity determined for every sample was divided by the averaged intensity of all the normal samples (Sample Nos. 62-66 and 69, Table 1, above, “Tissue samples in testing panel”), to obtain a value of fold up-regulation for each sample relative to the averaged normal samples. These data are presented in a histogram bellow, in FIG. 50. As is evident from the histogram (FIG. 50), the expression of Voltage-dependent L-type calcium channel alpha-1D subunit Calcium channel, L type, alpha-1 polypeptide, isoform 2 transcripts detectable with the above oligonucleotides in cancer samples was higher than in the normal samples.

[2951] Expression of Carcinoembryonic antigen-related cell adhesion molecule 5 CEACAM5 HUMCEA transcripts which are detectable by amplicon as depicted in sequence name HUMCEA seg31(SEQ ID NO:1342) in normal and cancerous colon tissues

[2952] Expression of CEACAM5 transcripts detectable by or according to seg31, HUMCEA (ver 3.4 T10888) seg31 amplicon (SEQ ID NO:1342) and HUMCEA seg31-F (SEQ ID NO:1340) HUMCEA seg31-R (SEQ ID NO:1341) primers was measured by real time PCR. In parallel the expression of four housekeeping genes—PBGD (GenBank Accession No. BC019323 (SEQ ID NO:1576); amplicon—PBGD-amplicon, SEQ ID NO:531), HPRT1 (GenBank Accession No. NM_{—}000194 (SEQ ID NO:1577); amplicon—HPRT1-amplicon, SEQ ID NO:612), G6PD (GenBank Accession No. NM_{—}000402 (SEQ ID NO:1578); G6PD amplicon, SEQ ID NO:615), RPS27A (GenBank Accession No. NM_{—}002954 (SEQ ID NO:1579); RPS27A amplicon, SEQ ID NO:1261), was measured similarly. For each RT sample, the expression of the above amplicon was normalized to the geometric mean of the quantities of the housekeeping genes. The normalized quantity of each RT sample was then divided by the median of the quantities of the normal post-mortem (PM) samples (Sample Nos. 41, 52, 62-67, 69-71, Table 1, above, “Tissue samples in testing panel”,), to obtain a value of fold up-regulation for each sample relative to median of the normal PM samples.

[2953] FIG. 51 is a histogram showing over expression of the above-indicated CEACAM5 transcripts in cancerous colon samples relative to the normal samples. The number and percentage of samples that exhibit at least 3fold over-expression, out of the total number of samples tested is indicated in the bottom.

[2954] As is evident from FIG. 51, the expression of CEACAM5 transcripts detectable by the above amplicon in cancer samples was significantly higher than in the non-cancerous samples (Sample Nos. 41, 52, 62-67, 69-71, Table 1, “Tissue samples in testing panel”). Notably an over-expression of at least 3 fold was found in 9 out of 37 adenocarcinoma samples.

[2955] Statistical analysis was applied to verify the significance of these results, as described below.

[2956] The P value for the difference in the expression levels of CEACAM5 transcripts detectable by the above amplicon in colon cancer samples versus the normal tissue samples was determined by T test as 6.24E-04. Threshold of 3 fold overexpression was found to differentiate between cancer and normal samples with P value of 7.42E-02 as checked by exact fisher test. The above values demonstrate statistical significance of the results.

[2957] Primer pairs are also optionally and preferably encompassed within the present invention; for example, for the above experiment, the following primer pair was used as a non-limiting illustrative example only of a suitable primer pair: HUMCEA seg31Fforward primer (SEQ ID NO:1340); and HUMCEA seg31 Rreverse primer (SEQ ID NO:1341).

[2958] The present invention also preferably encompasses any amplicon obtained through the use of any suitable primer pair; for example, for the above experiment, the following amplicon was obtained as a non-limiting illustrative example only of a suitable amplicon: HUMCEA seg31(SEQ ID NO:1342).

[2959] Expression of Carcinoembryonic antigen-related cell adhesion molecule 5 CEACAM5 HUMCEA transcripts which are detectable by amplicon as depicted in sequence name HUMCEA seg33 (SEQ ID NO:1345) in normal and cancerous colon tissues

[2960] Expression of CEACAM5transcripts detectable by or according to seg33, HUMCEA (ver 3.4 T10888) seg33 amplicon (SEQ ID NO:1345) and HUMCEA seg33 F (SEQ ID NO:1343) and HUMCEA seg33 R (SEQ ID NO:1344) primers was measured by real time PCR. In parallel the expression of four housekeeping genes—PBGD (GenBank Accession No. BC019323 (SEQ ID NO:1576); amplicon—PBGD-amplicon, SEQ ID NO:531), HPRT1 (GenBank Accession No. NM_{—}000194 (SEQ ID NO:1577); amplicon—HPRT1-amplicon, SEQ ID NO:612), G6PD (GenBank Accession No. NM_{—}000402 (SEQ ID NO:1578); G6PD amplicon, SEQ ID NO:615), RPS27A (GenBank Accession No. NM_{—}002954 (SEQ ID NO:1579); RPS27A amplicon, SEQ ID NO:1261), was measured similarly. For each RT sample, the expression of the above amplicon was normalized to the geometric mean of the quantities of the housekeeping genes. The normalized quantity of each RT sample was then divided by the median of the quantities of the normal post-mortem (PM) samples (Sample Nos. 41, 52, 62-67, 69-71, Table 1, above, “Tissue samples in testing panel”), to obtain a value of fold up-regulation for each sample relative to median of the normal PM samples.

[2961] FIG. 52 is a histogram showing over expression of the above-indicated CEACAM5 transcripts in cancerous colon samples relative to the normal samples. The number and percentage of samples that exhibit at least 3fold over-expression, out of the total number of samples tested is indicated in the bottom.

[2962] As is evident from FIG. 52, the expression of CEACAM5 transcripts detectable by the above amplicon in cancer samples was significantly higher than in the non-cancerous samples (Sample Nos. 41, 52, 62-67, 69-71, Table 1, “Tissue samples in testing panel”). Notably an over-expression of at least 3 fold was found in 11 out of 37 adenocarcinoma samples,

[2963] Statistical analysis was applied to verify the significance of these results, as described below.

[2964] The P value for the difference in the expression levels of CEACAM5 transcripts detectable by the above amplicon in colon cancer samples versus the normal tissue samples was determined by T test as 4.01E-04. Threshold of 3 fold overexpression was found to differentiate between cancer and normal samples with P value of 3.78E-02 as checked by exact fisher test. The above values demonstrate statistical significance of the results.

[2965] Primer pairs are also optionally and preferably encompassed within the present invention; for example, for the above experiment, the following primer pair was used as a non-limiting illustrative example only of a suitable primer pair: HUMCEA seg33Fforward primer (SEQ ID NO:1343); and HUMCEA seg33 Rreverse primer (SEQ ID NO:1344).

[2966] The present invention also preferably encompasses any amplicon obtained through the use of any suitable primer pair; for example, for the above experiment, the following amplicon was obtained as a non-limiting illustrative example only of a suitable amplicon: HUMCEA seg33 (SEQ ID NO:1345).

[2967] Expression of Carcinoembryonic antigen-related cell adhesion molecule 5 CEACAM5 HUMCEAtranscripts which are detectable by amplicon as depicted in sequence name HUMCEA seg35 (SEQ ID NO:1348) in normal and cancerous colon tissues

[2968] Expression of CEACAM5 transcripts detectable by or according to seg35, HUMCEA (ver 3.4 T10888) seg35 amplicon (SEQ ID NO:1348) and HUMCEA seg35 F (SEQ ID NO: 1346) and HUMCEA seg35 R (SEQ ID NO:1347) primers was measured by real time PCR. In parallel the expression of four housekeeping genes—PBGD (GenBank Accession No. BC019323 (SEQ ID NO:1576); amplicon—PBGD-amplicon, SEQ ID NO:531), HPRT1 (GenBank Accession No. NM_{—}000194 (SEQ ID NO:1577); amplicon—HPRT1-amplicon, SEQ ID NO:612), G6PD (GenBank Accession No. NM_{—}000402 (SEQ ID NO:1578); G6PD amplicon, SEQ ID NO:615), RPS27A (GenBank Accession No. NM_{—}002954 (SEQ ID NO:1579); RPS27A amplicon, SEQ ID NO:1261), was measured similarly. For each RT sample, the expression of the above amplicon was normalized to the geometric mean of the quantities of the housekeeping genes. The normalized quantity of each RT sample was then divided by the median of the quantities of the normal post-mortem (PM) samples (Sample Nos. 41, 52, 62-67, 69-71, Table 1, above, “Tissue samples in testing panel”), to obtain a value of fold up-regulation for each sample relative to median of the normal PM samples.

[2969] FIG. 53 is a histogram showing over expression of the above-indicated CEACAM5 transcripts in cancerous colon samples relative to the normal samples. The number and percentage of samples that exhibit at least 3fold over-expression, out of the total number of samples tested is indicated in the bottom.

[2970] As is evident from FIG. 53, the expression of CEACAM5 transcripts detectable by the above amplicon in cancer samples was significantly higher than in the non-cancerous samples (Sample Nos. 41, 52, 62-67, 69-71, Table 1, “Tissue samples in testing panel”). Notably an over-expression of at least 3 fold was found in 15 out of 37 adenocarcinoma samples,

[2971] Statistical analysis was applied to verify the significance of these results, as described below.

[2972] The P value for the difference in the expression levels of CEACAM5 transcripts detectable by the above amplicon in colon cancer samples versus the normal tissue samples was determined by T test as 8.96E-04. Threshold of 3 fold overexpression was found to differentiate between cancer and normal samples with P value of 1.27E-02 as checked by exact fisher test. The above values demonstrate statistical significance of the results.

[2973] Primer pairs are also optionally and preferably encompassed within the present invention; for example, for the above experiment, the following primer pair was used as a non-limiting illustrative example only of a suitable primer pair: HUMCEA seg35Fforward primer (SEQ ID NO:1346); and HUMCEA seg35 Rreverse primer (SEQ ID NO:1347).

[2974] The present invention also preferably encompasses any amplicon obtained through the use of any suitable primer pair; for example, for the above experiment, the following amplicon was obtained as a non-limiting illustrative example only of a suitable amplicon: HUMCEA seg35 (SEQ ID NO:1348).

Description for Cluster M78035

[2975] Cluster M78035 features 12 transcript(s) and 39 segment(s) of interest, the names for which are given in Tables 1 and 2, respectively, the sequences themselves are given at the end of the application. The selected protein variants are given in table 3.

[2976] These sequences are variants of the known protein Adenosylhomocysteinase (SwissProt accession identifier SAHH_HUMAN; known also according to the synonyms EC 3.3.1.1; S-adenosyl-L-homocysteine hydrolase; AdoHcyase), SEQ ID NO: 922, referred to herein as the previously known protein.

[2977] Protein Adenosylhomocysteinase (SEQ ID NO:922) is known or believed to have the following function(s): Adenosylhomocysteine is a competitive inhibitor of S-adenosyl-L-methionine-dependent methyl transferase reactions; therefore adenosylhomocysteinase may play a key role in the control of methylations via regulation of the intracellular concentration of adenosylhomocysteine. The sequence for protein Adenosylhomocysteinase is given at the end of the application, as “Adenosylhomocysteinase amino acid sequence”. Known polymorphisms for this sequence are as shown in Table 4.

[2978] Protein Adenosylhomocysteinase (SEQ ID NO:922) localization is believed to be Cytoplasmic.

[2979] The following GO Annotation(s) apply to the previously known protein. The following annotation(s) were found: one-carbon compound metabolism, which are annotation(s) related to Biological Process; adenosylhomocysteinase; hydrolase, which are annotation(s) related to Molecular Function; and cytoplasm, which are annotation(s) related to Cellular Component.

[2980] The GO assignment relies on information from one or more of the SwissProt/TremB1 Protein knowledgebase, available from <http://www.expasy.ch/sprot/>; or Locuslink, available from <http://www.ncbi.nlm.nih.gov/projects/LocusLink/>.

[2981] Cluster M78035 can be used as a diagnostic marker according to overexpression of transcripts of this cluster in cancer. Expression of such transcripts in normal tissues is also given according to the previously described methods. The term “number” in the left hand column of the table and the numbers on the y-axis of the figure below refer to weighted expression of ESTs in each category, as “parts per million” (ratio of the expression of ESTs for a particular cluster to the expression of all ESTs in that category, according to parts per million).

[2982] Overall, the following results were obtained as shown with regard to the histograms in FIG. 54 and Table 5. This cluster is overexpressed (at least at a minimum level) in the following pathological conditions: brain malignant tumors, colorectal cancer, epithelial malignant tumors, a mixture of malignant tumors from different tissues, malignant tumors involving the lymph nodes and pancreas carcinoma.

[2983] As noted above, cluster M78035 features 12 transcript(s), which were listed in Table 1 above. These transcript(s) encode for protein(s) which are variant(s) of protein Adenosylhomocysteinase (SEQ ID NO:922). A description of each variant protein according to the present invention is now provided.

[2984] Variant protein M78035_P2 (SEQ ID NO:923) according to the present invention has an amino acid sequence as given at the end of the application; it is encoded by transcript(s) M78035_T0 (SEQ ID NO:871), M78035_T17 (SEQ ID NO:877), M78035_T18 (SEQ ID NO:878), M78035_T19 (SEQ ID NO:879) and M78035_T20 (SEQ ID NO:880). The location of the variant protein was determined according to results from a number of different software programs and analyses, including analyses from SignalP and other specialized programs. The variant protein is believed to be located as follows with regard to the cell: intracellularly. The protein localization is believed to be intracellularly because neither of the trans-membrane region prediction programs predicted a trans-membrane region for this protein. In addition both signal-peptide prediction programs predict that this protein is a non-secreted protein.

[2985] Variant protein M78035_P2 (SEQ ID NO:923) also has the following non-silent SNPs (Single Nucleotide Polymorphisms) as listed in Table 7, (given according to their position(s) on the amino acid sequence, with the alternative amino acid(s) listed; the last column indicates whether the SNP is known or not; the presence of known SNPs in variant protein M78035_P2 (SEQ ID NO:923) sequence provides support for the deduced sequence of this variant protein according to the present invention).

[2986] Variant protein M78035_P2 (SEQ ID NO:923) is encoded by the following transcript(s): M78035_T0 (SEQ ID NO:871), M78035_T17 (SEQ ID NO:877), M78035_T18 (SEQ ID NO:878), M78035_T19 (SEQ ID NO:879) and M78035_T20 (SEQ ID NO:880), for which the sequence(s) is/are given at the end of the application.

[2987] The coding portion of transcript M78035_T0 (SEQ ID NO:871) is shown in bold; this coding portion starts at position 132 and ends at position 1427. The transcript also has the following SNPs as listed in Table 8 (given according to their position on the nucleotide sequence, with the alternative nucleic acid listed; the last column indicates whether the SNP is known or not; the presence of known SNPs in variant protein M78035_P2 (SEQ ID NO:923) sequence provides support for the deduced sequence of this variant protein according to the present invention).

[2988] The coding portion of transcript M78035_T17(SEQ ID NO:877) is shown in bold; this portion starts at position 132 and ends at position 1427. The transcript also has the following SNPs as listed in Table 9 (given according to their position on the nucleotide sequence, with the alternative nucleic acid listed; the last column indicates whether the SNP is known or not; the presence of known SNPs in variant protein M78035_P2 (SEQ ID NO:923) sequence provides support for the deduced sequence of this variant protein according to the present invention).

[2989] The coding portion of transcript M78035_T18 (SEQ ID NO:878) is shown in bold; this coding portion starts at position 132 and ends at position 1427. The transcript also has the following SNPs as listed in Table 10 (given according to their position on the nucleotide sequence, with the alternative nucleic acid listed; the last column indicates whether the SNP is known or not; the presence of known SNPs in variant protein M78035_P2 (SEQ ID NO:923) sequence provides support for the deduced sequence of this variant protein according to the present invention).

[2990] The coding portion of transcript M78035_T19 (SEQ ID NO:879) is shown in bold; this coding portion starts at position 132 and ends at position 1427. The transcript also has the following SNPs as listed in Table 11 (given according to their position on the nucleotide sequence, with the alternative nucleic acid listed; the last column indicates whether the SNP is known or not; the presence of known SNPs in variant protein M78035_P2 (SEQ ID NO:923) sequence provides support for the deduced sequence of this variant protein according to the present invention).

[2991] The coding portion of transcript M78035_T20 (SEQ ID NO:880) is shown in bold; this coding portion starts at position 132 and ends at position 1427. The transcript also has the following SNPs as listed in Table 12 (given according to their position on the nucleotide sequence, with the alternative nucleic acid listed; the last column indicates whether the SNP is known or not; the presence of known SNPs in variant protein M78035_P2 (SEQ ID NO:923) sequence provides support for the deduced sequence of this variant protein according to the present invention).

[2992] Variant protein M78035_P4 (SEQ ID NO:924) according to the present invention has an amino acid sequence as given at the end of the application; it is encoded by transcript(s) M78035_T3 (SEQ ID NO:872) and M78035_T4 (SEQ ID NO:873). An alignment is given to the known protein (Adenosylhomocysteinase (SEQ ID NO:922)) at the end of the application. One or more alignments to one or more previously published protein sequences are given at the end of the application. A brief description of the relationship of the variant protein according to the present invention to each such aligned protein is as follows:

[2993] Comparison report between M78035_P4 (SEQ ID NO:924) and SAHH_HUMAN (SEQ ID NO:922):

[2994] 1. An isolated chimeric polypeptide encoding for M78035_P4 (SEQ ID NO:924), comprising a first amino acid sequence being at least 90% homologous to MPGLMRMRERYSASKPLKGARIAGCLHMTVETAVLIETLVTLGAEVQWSSCNIFSTQD HAAAAIAKAGIPVYAWKGETDEEYLWCIEQTLYFKDGPLNMILDDGGDLTNLIHTKYP QLLPGIRGISEETTTGVHNLYKMMANGILKVPAINVNDSVTKSKFDNLYGCRESLIDGIK RATDVMIAGKVAVVAGYGDVGKGCAQALRGFGARVIITEIDPINALQAAMEGYEVTT MDEACQEGNIFVTTTGCIDIILGRHFEQMKDDAIVCNIGHFDVEIDVKWLNENAVEKVN IKPQVDRYRLKNGRRIILLAEGRLVNLGCAMGHPSFVMSNSFTNQVMAQIELWTHPDK YPVGVHFLPKKLDEAVAEAHLGKLNVKLTKLTEKQAQYLGMSCDGPFKPDHYRY corresponding to amino acids 29-432 of SAHH_HUMAN (SEQ ID NO:922, which also corresponds to amino acids 1-404 of M78035_P4 (SEQ ID NO:924).

[2995] The location of the variant protein was determined according to results from a number of different software programs and analyses, including analyses from SignalP and other specialized programs. The variant protein is believed to be located as follows with regard to the cell: intracellularly. The protein localization is believed to be intracellularly because neither of the trans-membrane region prediction programs predicted a trans-membrane region for this protein. In addition both signal-peptide prediction programs predict that this protein is a non-secreted protein.

[2996] Variant protein M78035_P4 (SEQ ID NO:924) also has the following non-silent SNPs (Single Nucleotide Polymorphisms) as listed in Table 13, (given according to their position(s) on the amino acid sequence, with the alternative amino acid(s) listed; the last column indicates whether the SNP is known or not; the presence of known SNPs in variant protein M78035_P4 (SEQ ID NO:924) sequence provides support for the deduced sequence of this variant protein according to the present invention).

[2997] Variant protein M78035_P4 (SEQ ID NO:924) is encoded by the following transcript(s): M78035_T3 (SEQ ID NO:872) and M78035_T4 (SEQ ID NO:873), for which the sequence(s) is/are given at the end of the application.

[2998] The coding portion of transcript M78035_T3 (SEQ ID NO:872) is shown in bold; this coding portion starts at position 301 and ends at position 1512. The transcript also has the following SNPs as listed in Table 14 (given according to their position on the nucleotide sequence, with the alternative nucleic acid listed; the last column indicates whether the SNP is known or not; the presence of known SNPs in variant protein M78035_P4 (SEQ ID NO:924) sequence provides support for the deduced sequence of this variant protein according to the present invention).

[2999] The coding portion of transcript M78035_T4 (SEQ ID NO:873) is shown in bold; this coding portion starts at position 897 and ends at position 2108. The transcript also has the following SNPs as listed in Table 15 (given according to their position on the nucleotide sequence, with the alternative nucleic acid listed; the last column indicates whether the SNP is known or not; the presence of known SNPs in variant protein M78035_P4 (SEQ ID NO:924) sequence provides support for the deduced sequence of this variant protein according to the present invention).

[3000] Variant protein M78035_P6 (SEQ ID NO:925) according to the present invention has an amino acid sequence as given at the end of the application; it is encoded by transcript(s) M78035_T7 (SEQ ID NO:874) and M78035_T9 (SEQ ID NO:875). An alignment is given to the known protein (Adenosylhomocysteinase (SEQ ID NO:922)) at the end of the application. One or more alignments to one or more previously published protein sequences are given at the end of the application. A brief description of the relationship of the variant protein according to the present invention to each such aligned protein is as follows:

[3001] Comparison report between M78035_P6 (SEQ ID NO:925) and SAHH_HUMAN (SEQ ID NO:922):

[3002] 1. An isolated chimeric polypeptide encoding for M78035_P6 (SEQ ID NO:925), comprising a first amino acid sequence being at least 90% homologous to MILDDGGDLTNLIHTKYPQLLPGIRGISEETTTGVHNLYKMMANGILKVPAINVNDSVT KSKFDNLYGCRESLIDGIKRATDVMIAGKVAVVAGYGDVGKGCAQALRGFGARVIITEI DPINALQAAMEGYEVTTMDEACQEGNIFVTTTGCIDIILGRHFEQMKDDAIVCNIGHFD VEIDVKWLNENAVEKVNIKPQVDRYRLKNGRRIILLAEGRLVNLGCAMGHPSFVMSNS FTNQVMAQIELWTHPDKYPVGVHFLPKKLDEAVAEAHLGKLNVKLTKLTEKQAQYLG MSCDGPFKPDHYRY corresponding to amino acids 127-432 of SAHH_HUMAN (SEQ ID NO:922), which also corresponds to amino acids 1-306 of M78035_P6 (SEQ ID NO:925).

[3003] The location of the variant protein was determined according to results from a number of different software programs and analyses, including analyses from SignalP and other specialized programs. The variant protein is believed to be located as follows with regard to the cell: intracellularly. The protein localization is believed to be intracellularly because neither of the trans-membrane region prediction programs predicted a trans-membrane region for this protein. In addition both signal-peptide prediction programs predict that this protein is a non-secreted protein.

[3004] Variant protein M78035_P6 (SEQ ID NO:925) also has the following non-silent SNPs (Single Nucleotide Polymorphisms) as listed in Table 16, (given according to their position(s) on the amino acid sequence, with the alternative amino acid(s) listed; the last column indicates whether the SNP is known or not; the presence of known SNPs in variant protein M78035_P6 (SEQ ID NO:925) sequence provides support for the deduced sequence of this variant protein according to the present invention).

[3005] Variant protein M78035_P6 (SEQ ID NO:925) is encoded by the following transcript(s): M78035_T7 (SEQ ID NO:874) and M78035_T9 (SEQ ID NO:875), for which the sequence(s) is/are given at the end of the application.

[3006] The coding portion of transcript M78035_T7 (SEQ ID NO:874) is shown in bold; this coding portion starts at position 556 and ends at position 1473. The transcript also has the following SNPs as listed in Table 17 (given according to their position on the nucleotide sequence, with the alternative nucleic acid listed; the last column indicates whether the SNP is known or not; the presence of known SNPs in variant protein M78035_P6 (SEQ ID NO:925) sequence provides support for the deduced sequence of this variant protein according to the present invention).

[3007] The coding portion of transcript M78035_T9 (SEQ ID NO:875) is shown in bold; this coding portion starts at position 768 and ends at position 1685. The transcript also has the following SNPs as listed in Table 18 (given according to their position on the nucleotide sequence, with the alternative nucleic acid listed; the last column indicates whether the SNP is known or not; the presence of known SNPs in variant protein M78035_P6 (SEQ ID NO:925) sequence provides support for the deduced sequence of this variant protein according to the present invention).

[3008] Variant protein M78035_P8 (SEQ ID NO:926) according to the present invention has an amino acid sequence as given at the end of the application; it is encoded by transcript(s) M78035_T11 (SEQ ID NO:876). An alignment is given to the known protein (Adenosylhomocysteinase (SEQ ID NO:922)) at the end of the application. One or more alignments to one or more previously published protein sequences are given at the end of the application. A brief description of the relationship of the variant protein according to the present invention to each such aligned protein is as follows:

[3009] Comparison report between M78035_P8 (SEQ ID NO:926) and SAHH_HUMAN (SEQ ID NO:922):

[3010] 1. An isolated chimeric polypeptide encoding for M78035_P8 (SEQ ID NO:926), comprising a first amino acid sequence being at least 70%, optionally at least 80%, preferably at least 85%, more preferably at least 90% and most preferably at least 95% homologous to a polypeptide having the sequence MSDKLPYKV (SEQ ID NO:1474) corresponding to amino acids 1-9 of M78035_P8 (SEQ ID NO:926), and a second amino acid sequence being at least 90% homologous to VYAWKGETDEEYLWCIEQTLYFKDGPLNMILDDGGDLTNLIHTKYPQLLPGIRGISEET TTGVHNLYKMMANGILKVPAINVNDSVTKSKFDNLYGCRESLIDGIKRATDVMIAGKV AVVAGYGDVGKGCAQALRGFGARVIITEIDPINALQAAMEGYEVTTMDEACQEGNIFV TTTGCIDIILGRHFEQMKDDAIVCNIGHFDVEIDVKWLNENAVEKVNIKPQVDRYRLKN GRRIILLAEGRLVNLGCAMGHPSFVMSNSFTNQVMAQIELWTHPDKYPVGVHFLPKKL DEAVAEAHLGKLNVKLTKLTEKQAQYLGMSCDGPFKPDHYRY corresponding to amino acids 99-432 of SAHH_HUMAN (SEQ ID NO:922), which also corresponds to amino acids 10-343 of M78035_P8 (SEQ ID NO:926), wherein said first amino acid sequence and second amino acid sequence are contiguous and in a sequential order.

[3011] 2. An isolated polypeptide encoding for a head of M78035_P8 (SEQ ID NO:926), comprising a polypeptide being at least 70%, optionally at least about 80%, preferably at least about 85%, more preferably at least about 90% and most preferably at least about 95% homologous to the sequence MSDKLPYKV (SEQ ID NO:1474) of M78035_P8 (SEQ ID NO:926).

[3012] The location of the variant protein was determined according to results from a number of different software programs and analyses, including analyses from SignalP and other specialized programs. The variant protein is believed to be located as follows with regard to the cell: intracellularly. The protein localization is believed to be intracellularly because neither of the trans-membrane region prediction programs predicted a trans-membrane region for this protein. In addition both signal-peptide prediction programs predict that this protein is a non-secreted protein.

[3013] Variant protein M78035_P8 (SEQ ID NO:926) also has the following non-silent SNPs (Single Nucleotide Polymorphisms) as listed in Table 19, (given according to their position(s) on the amino acid sequence, with the alternative amino acid(s) listed; the last column indicates whether the SNP is known or not; the presence of known SNPs in variant protein M78035_P8 (SEQ ID NO:926) sequence provides support for the deduced sequence of this variant protein according to the present invention).

[3014] Variant protein M78035_P8 (SEQ ID NO:926) is encoded by the following transcript(s): M78035_T11 (SEQ ID NO:876), for which the sequence(s) is/are given at the end of the application. The coding portion of transcript M78035_T11 (SEQ ID NO:876) is shown in bold; this coding portion starts at position 132 and ends at position 1160. The transcript also has the following SNPs as listed in Table 20 (given according to their position on the nucleotide sequence, with the alternative nucleic acid listed; the last column indicates whether the SNP is known or not; the presence of known SNPs in variant protein M78035_P8 (SEQ ID NO:926) sequence provides support for the deduced sequence of this variant protein according to the present invention).

[3015] Variant protein M78035_P18 (SEQ ID NO:927) according to the present invention has an amino acid sequence as given at the end of the application; it is encoded by transcript(s) M78035_T27 (SEQ ID NO:881). The location of the variant protein was determined according to results from a number of different software programs and analyses, including analyses from SignalP and other specialized programs. The variant protein is believed to be located as follows with regard to the cell: intracellularly. The protein localization is believed to be intracellularly because neither of the trans-membrane region prediction programs predicted a trans-membrane region for this protein. In addition both signal-peptide prediction programs predict that this protein is a non-secreted protein.

[3016] Variant protein M78035_P18 (SEQ ID NO:927) also has the following non-silent SNPs (Single Nucleotide Polymorphisms) as listed in Table 21, (given according to their position(s) on the amino acid sequence, with the alternative amino acid(s) listed; the last column indicates whether the SNP is known or not; the presence of known SNPs in variant protein M78035_P18 (SEQ ID NO:927) sequence provides support for the deduced sequence of this variant protein according to the present invention).

[3017] Variant protein M78035_P18 (SEQ ID NO:927) is encoded by the following transcript(s): M78035_T27 (SEQ ID NO:881), for which the sequence(s) is/are given at the end of the application. The coding portion of transcript M78035_T27 (SEQ ID NO:881) is shown in bold; this coding portion starts at position 132 and ends at position 617. The transcript also has the following SNPs as listed in Table 22 (given according to their position on the nucleotide sequence, with the alternative nucleic acid listed; the last column indicates whether the SNP is known or not; the presence of known SNPs in variant protein M78035_P18 (SEQ ID NO:927) sequence provides support for the deduced sequence of this variant protein according to the present invention).

[3018] Variant protein M78035_P19 (SEQ ID NO:928) according to the present invention has an amino acid sequence as given at the end of the application; it is encoded by transcript(s) M78035_T28 (SEQ ID NO:882). The location of the variant protein was determined according to results from a number of different software programs and analyses, including analyses from SignalP and other specialized programs. The variant protein is believed to be located as follows with regard to the cell: intracellularly. The protein localization is believed to be intracellularly because neither of the trans-membrane region prediction programs predicted a trans-membrane region for this protein. In addition both signal-peptide prediction programs predict that this protein is a non-secreted protein.

[3019] Variant protein M78035_P19 (SEQ ID NO:928) is encoded by the following transcript(s): M78035_T28 (SEQ ID NO:882), for which the sequence(s) is/are given at the end of the application. The coding portion of transcript M78035_T28 (SEQ ID NO:882) is shown in bold; this coding portion starts at position 585 and ends at position 902. The transcript also has the following SNPs as listed in Table 23 (given according to their position on the nucleotide sequence, with the alternative nucleic acid listed; the last column indicates whether the SNP is known or not; the presence of known SNPs in variant protein M78035_P19 (SEQ ID NO:928) sequence provides support for the deduced sequence of this variant protein according to the present invention).

[3020] As noted above, cluster M78035 features 39 segment(s), which were listed in Table 2 above and for which the sequence(s) are given at the end of the application. These segment(s) are portions of nucleic acid sequence(s) which are described herein separately because they are of particular interest. A description of each segment according to the present invention is now provided.

[3021] Segment cluster M78035_node_{—}4 (SEQ ID NO:883) according to the present invention is supported by 163 libraries. The number of libraries was determined as previously described. This segment can be found in the following transcript(s): M78035_T0 (SEQ ID NO:871), M78035_T7 (SEQ ID NO:874), M78035_T11 (SEQ ID NO:876), M78035_T17 (SEQ ID NO:877), M78035_T18 (SEQ ID NO:878), M78035_T19 (SEQ ID NO:879), M78035_T20 (SEQ ID NO:880) and M78035_T27 (SEQ ID NO:881). Table 24 below describes the starting and ending position of this segment on each transcript.

[3022] Segment cluster M78035_node_{—}6 (SEQ ID NO:884) according to the present invention is supported by 5 libraries. The number of libraries was determined as previously described. This segment can be found in the following transcript(s): M78035_T4 (SEQ ID NO:873). Table 25 below describes the starting and ending position of this segment on each transcript.

[3023] Segment cluster M78035_node_{—}10 (SEQ ID NO:885) according to the present invention is supported by 3 libraries. The number of libraries was determined as previously described. This segment can be found in the following transcript(s): M78035_T3 (SEQ ID NO:872) and M78035_T9 (SEQ ID NO:875). Table 26 below describes the starting and ending position of this segment on each transcript.

[3024] Segment cluster M78035_node_{—}17 (SEQ ID NO:886) according to the present invention is supported by 189 libraries. The number of libraries was determined as previously described. This segment can be found in the following transcript(s): M78035_T0 (SEQ ID NO:871), M78035_T3 (SEQ ID NO:872), M78035_T4 (SEQ ID NO:873), M78035_T7 (SEQ ID NO:874), M78035_T9 (SEQ ID NO:875), M78035_T17 (SEQ ID NO:877), M78035_T18 (SEQ ID NO:878), M78035_T19 (SEQ ID NO:879), M78035_T20 (SEQ ID NO:880) and M78035_T27 (SEQ ID NO:881). Table 27 below describes the starting and ending position of this segment on each transcript.

[3025] Segment cluster M78035_node_{—}18 (SEQ ID NO:887) according to the present invention is supported by 2 libraries. The number of libraries was determined as previously described. This segment can be found in the following transcript(s): M78035_T9 (SEQ ID NO:875) and M78035_T27 (SEQ ID NO:881). Table 28 below describes the starting and ending position of this segment on each transcript.

[3026] Segment cluster M78035_node_{—}21 (SEQ ID NO:888) according to the present invention is supported by 3 libraries. The number of libraries was determined as previously described. This segment can be found in the following transcript(s): M78035_T27 (SEQ ID NO:881). Table 29 below describes the starting and ending position of this segment on each transcript.

[3027] Segment cluster M78035_node_{—}25 (SEQ ID NO:889) according to the present invention is supported by 171 libraries. The number of libraries was determined as previously described. This segment can be found in the following transcript(s): M78035_T0 (SEQ ID NO:871), M78035_T3 (SEQ ID NO:872), M78035_T4 (SEQ ID NO:873), M78035_T7 (SEQ ID NO:874), M78035_T9 (SEQ ID NO:875), M78035_T11 (SEQ ID NO:876), M78035_T17 (SEQ ID NO:877), M78035_T18 (SEQ ID NO:878), M78035_T19 (SEQ ID NO:879) and M78035_T20 (SEQ ID NO:880). Table 30 below describes the starting and ending position of this segment on each transcript.

[3028] Segment cluster M78035_node_{—}33 (SEQ ID NO:890) according to the present invention is supported by 191 libraries. The number of libraries was determined as previously described. This segment can be found in the following transcript(s): M78035_T0 (SEQ ID NO:871), M78035_T3 (SEQ ID NO:872), M78035_T4 (SEQ ID NO:873), M78035_T7 (SEQ ID NO:874), M78035_T9 (SEQ ID NO:875), M78035_T11 (SEQ ID NO:876), M78035_T17 (SEQ ID NO:877), M78035_T18 (SEQ ID NO:878), M78035_T19 (SEQ ID NO:879) and M78035_T20 (SEQ ID NO:880). Table 31 below describes the starting and ending position of this segment on each transcript.

[3029] Segment cluster M78035_node_{—}55 (SEQ ID NO:891) according to the present invention is supported by 238 libraries. The number of libraries was determined as previously described. This segment can be found in the following transcript(s): M78035_T0 (SEQ ID NO:871), M78035_T3 (SEQ ID NO:872), M78035_T4 (SEQ ID NO:873), M78035_T7 (SEQ ID NO:874), M78035_T9 (SEQ ID NO:875) and M78035_T11 (SEQ ID NO:876). Table 32 below describes the starting and ending position of this segment on each transcript.

[3030] Segment cluster M78035_node_{—}58 (SEQ ID NO:892) according to the present invention is supported by 273 libraries. The number of libraries was determined as previously described. This segment can be found in the following transcript(s): M78035_T0 (SEQ ID NO:871), M78035_T3 (SEQ ID NO:872), M78035_T4 (SEQ ID NO:873), M78035_T7 (SEQ ID NO:874), M78035_T9 (SEQ ID NO:875) and M78035_T11 (SEQ ID NO:876). Table 33 below describes the starting and ending position of this segment on each transcript.

[3031] Segment cluster M78035_node_{—}60 (SEQ ID NO:893) according to the present invention is supported by 268 libraries. The number of libraries was determined as previously described. This segment can be found in the following transcript(s): M78035_T0 (SEQ ID NO:871), M78035_T3 (SEQ ID NO:872), M78035_T4 (SEQ ID NO:873), M78035_T7 (SEQ ID NO:874), M78035_T9 (SEQ ID NO:875) and M78035_T11 (SEQ ID NO:876). Table 34 below describes the starting and ending position of this segment on each transcript.

[3032] Segment cluster M78035_node_{—}62 (SEQ ID NO:894) according to the present invention is supported by 4 libraries. The number of libraries was determined as previously described. This segment can be found in the following transcript(s): M78035_T19 (SEQ ID NO:879) and M78035_T20 (SEQ ID NO:880). Table 35 below describes the starting and ending position of this segment on each transcript.

[3033] Segment cluster M78035_node_{—}63 (SEQ ID NO:895) according to the present invention is supported by 8 libraries. The number of libraries was determined as previously described. This segment can be found in the following transcript(s): M78035_T19 (SEQ ID NO:879), M78035_T20 (SEQ ID NO:880) and M78035_T28 (SEQ ID NO:882). Table 36 below describes the starting and ending position of this segment on each transcript.

[3034] Segment cluster M78035_node_{—}64 (SEQ ID NO:896) according to the present invention is supported by 5 libraries. The number of libraries was determined as previously described. This segment can be found in the following transcript(s): M78035_T19 (SEQ ID NO:879) and M78035_T28 (SEQ ID NO:882). Table 37 below describes the starting and ending position of this segment on each transcript.

[3035] Segment cluster M78035_node_{—}65 (SEQ ID NO:897) according to the present invention is supported by 3 libraries. The number of libraries was determined as previously described. This segment can be found in the following transcript(s): M78035_T19 (SEQ ID NO:879), M78035_T20 (SEQ ID NO:880) and M78035_T28 (SEQ ID NO:882). Table 38 below describes the starting and ending position of this segment on each transcript.

[3036] Segment cluster M78035_node_{—}69 (SEQ ID NO:898) according to the present invention is supported by 1 libraries. The number of libraries was determined as previously described. This segment can be found in the following transcript(s): M78035_T18 (SEQ ID NO:878). Table 39 below describes the starting and ending position of this segment on each transcript.

[3037] Segment cluster M78035_node_{—}71 (SEQ ID NO:899) according to the present invention is supported by 7 libraries. The number of libraries was determined as previously described. This segment can be found in the following transcript(s): M78035_T17 (SEQ ID NO:877) and M78035_T18 (SEQ ID NO:878). Table 40 below describes the starting and ending position of this segment on each transcript.

[3038] According to an optional embodiment of the present invention, short segments related to the above cluster are also provided. These segments are up to about 120 bp in length, and so are included in a separate description.

[3039] Segment cluster M78035_node_{—}14 (SEQ ID NO:900) according to the present invention is supported by 2 libraries. The number of libraries was determined as previously described. This segment can be found in the following transcript(s): M78035_T28 (SEQ ID NO:882). Table 41 below describes the starting and ending position of this segment on each transcript.

[3040] Segment cluster M78035_node_{—}15 (SEQ ID NO:901) according to the present invention is supported by 1 libraries. The number of libraries was determined as previously described. This segment can be found in the following transcript(s): M78035_T28 (SEQ ID NO:882). Table 42 below describes the starting and ending position of this segment on each transcript.

[3041] Segment cluster M78035_node_{—}20 (SEQ ID NO:902) according to the present invention is supported by 162 libraries. The number of libraries was determined as previously described. This segment can be found in the following transcript(s): M78035_T0 (SEQ ID NO:871), M78035_T3 (SEQ ID NO:872), M78035_T4 (SEQ ID NO:873), M78035_T7 (SEQ ID NO:874), M78035_T9 (SEQ ID NO:875), M78035_T17 (SEQ ID NO:877), M78035_T18 (SEQ ID NO:878), M78035_T19 (SEQ ID NO:879), M78035_T20 (SEQ ID NO:880) and M78035_T27 (SEQ ID NO:881). Table 43 below describes the starting and ending position of this segment on each transcript.

[3042] Segment cluster M78035_node_{—}24 (SEQ ID NO:903) according to the present invention is supported by 1 libraries. The number of libraries was determined as previously described. This segment can be found in the following transcript(s): M78035_T7 (SEQ ID NO:874). Table 44 below describes the starting and ending position of this segment on each transcript.

[3043] Segment cluster M78035_node_{—}26 (SEQ ID NO:904) according to the present invention can be found in the following transcript(s): M78035_T0 (SEQ ID NO:871), M78035_T3 (SEQ ID NO:872), M78035_T4 (SEQ ID NO:873), M78035_T7 (SEQ ID NO:874), M78035_T9 (SEQ ID NO:875), M78035_T11 (SEQ ID NO:876), M78035_T17 (SEQ ID NO:877), M78035_T18 (SEQ ID NO:878), M78035_T19 (SEQ ID NO:879) and M78035_T20 (SEQ ID NO:880). Table 45 below describes the starting and ending position of this segment on each transcript.

[3044] Segment cluster M78035_node_{—}28 (SEQ ID NO:905) according to the present invention is supported by 161 libraries. The number of libraries was determined as previously described. This segment can be found in the following transcript(s): M78035_T0 (SEQ ID NO:871), M78035_T3 (SEQ ID NO:872), M78035_T4 (SEQ ID NO:873), M78035_T7 (SEQ ID NO:874), M78035_T9 (SEQ ID NO:875), M78035_T11 (SEQ ID NO:876), M78035_T17 (SEQ ID NO:877), M78035_T18 (SEQ ID NO:878), M78035_T19 (SEQ ID NO:879) and M78035_T20 (SEQ ID NO:880). Table 46 below describes the starting and ending position of this segment on each transcript.

[3045] Segment cluster M78035_node_{—}29 (SEQ ID NO:906) according to the present invention is supported by 157 libraries. The number of libraries was determined as previously described. This segment can be found in the following transcript(s): M78035_T0 (SEQ ID NO:871), M78035_T3 (SEQ ID NO:872), M78035_T4 (SEQ ID NO:873), M78035_T7 (SEQ ID NO:874), M78035_T9 (SEQ ID NO:875), M78035_T11 (SEQ ID NO:876), M78035_T17 (SEQ ID NO:877), M78035_T18 (SEQ ID NO:878), M78035_T19 (SEQ ID NO:879) and M78035_T20 (SEQ ID NO:880). Table 47 below describes the starting and ending position of this segment on each transcript.

[3046] Segment cluster M78035_node_{—}30 (SEQ ID NO:907) according to the present invention can be found in the following transcript(s): M78035_T0 (SEQ ID NO:871), M78035_T3 (SEQ ID NO:872), M78035_T4 (SEQ ID NO:873), M78035_T7 (SEQ ID NO:874), M78035_T9 (SEQ ID NO:875), M78035_T11 (SEQ ID NO:876), M78035_T17 (SEQ ID NO:877), M78035_T18 (SEQ ID NO:878), M78035_T19 (SEQ ID NO:879) and M78035_T20 (SEQ ID NO:880). Table 48 below describes the starting and ending position of this segment on each transcript.

[3047] Segment cluster M78035_node_{—}31 (SEQ ID NO:908) according to the present invention can be found in the following transcript(s): M78035_T0 (SEQ ID NO:871), M78035_T3 (SEQ ID NO:872), M78035_T4 (SEQ ID NO:873), M78035_T7 (SEQ ID NO:874), M78035_T9 (SEQ ID NO:875), M78035_T11 (SEQ ID NO:876), M78035_T17 (SEQ ID NO:877), M78035_T18 (SEQ ID NO:878), M78035_T19 (SEQ ID NO:879) and M78035_T20 (SEQ ID NO:880). Table 49 below describes the starting and ending position of this segment on each transcript.

[3048] Segment cluster M78035_node_{—}34 (SEQ ID NO:909) according to the present invention can be found in the following transcript(s): M78035_T0 (SEQ ID NO:871), M78035_T3 (SEQ ID NO:872), M78035_T4 (SEQ ID NO:873), M78035_T7 (SEQ ID NO:874), M78035_T9 (SEQ ID NO:875), M78035_T11 (SEQ ID NO:876), M78035_T17 (SEQ ID NO:877), M78035_T18 (SEQ ID NO:878), M78035_T19 (SEQ ID NO:879) and M78035_T20 (SEQ ID NO:880). Table 50 below describes the starting and ending position of this segment on each transcript.

[3049] Segment cluster M78035_node_{—}35 (SEQ ID NO:910) according to the present invention can be found in the following transcript(s): M78035_T0 (SEQ ID NO:871), M78035_T3 (SEQ ID NO:872), M78035_T4 (SEQ ID NO:873), M78035_T7 (SEQ ID NO:874), M78035_T9 (SEQ ID NO:875), M78035_T11 (SEQ ID NO:876), M78035_T17 (SEQ ID NO:877), M78035_T18 (SEQ ID NO:878), M78035_T19 (SEQ ID NO:879) and M78035_T20 (SEQ ID NO:880). Table 51 below describes the starting and ending position of this segment on each transcript.

[3050] Segment cluster M78035_node_{—}37 (SEQ ID NO:911) according to the present invention is supported by 177 libraries. The number of libraries was determined as previously described. This segment can be found in the following transcript(s): M78035_T0 (SEQ ID NO:871), M78035_T3 (SEQ ID NO:872), M78035_T4 (SEQ ID NO:873), M78035_T7 (SEQ ID NO:874), M78035_T9 (SEQ ID NO:875), M78035_T11 (SEQ ID NO:876), M78035_T17 (SEQ ID NO:877), M78035_T18 (SEQ ID NO:878), M78035_T19 (SEQ ID NO:879) and M78035_T20 (SEQ ID NO:880). Table 52 below describes the starting and ending position of this segment on each transcript.

[3051] Segment cluster M78035_node_{—}40 (SEQ ID NO:912) according to the present invention is supported by 194 libraries. The number of libraries was determined as previously described. This segment can be found in the following transcript(s): M78035_T0 (SEQ ID NO:871), M78035_T3 (SEQ ID NO:872), M78035_T4 (SEQ ID NO:873), M78035_T7 (SEQ ID NO:874), M78035_T9 (SEQ ID NO:875), M78035_T11 (SEQ ID NO:876), M78035_T17 (SEQ ID NO:877), M78035_T18 (SEQ ID NO:878), M78035_T19 (SEQ ID NO:879) and M78035_T20 (SEQ ID NO:880). Table 53 below describes the starting and ending position of this segment on each transcript.

[3052] Segment cluster M78035_node_{—}48 (SEQ ID NO:913) according to the present invention is supported by 180 libraries. The number of libraries was determined as previously described. This segment can be found in the following transcript(s): M78035_T0 (SEQ ID NO:871), M78035_T3 (SEQ ID NO:872), M78035_T4 (SEQ ID NO:873), M78035_T7 (SEQ ID NO:874), M78035_T9 (SEQ ID NO:875), M78035_T11 (SEQ ID NO:876), M78035_T17 (SEQ ID NO:877), M78035_T18 (SEQ ID NO:878), M78035_T19 (SEQ ID NO:879) and M78035_T20 (SEQ ID NO:880). Table 54 below describes the starting and ending position of this segment on each transcript.

[3053] Segment cluster M78035_node_{—}49 (SEQ ID NO:914) according to the present invention is supported by 190 libraries. The number of libraries was determined as previously described. This segment can be found in the following transcript(s): M78035_T0 (SEQ ID NO:871), M78035_T3 (SEQ ID NO:872), M78035_T4 (SEQ ID NO:873), M78035_T7 (SEQ ID NO:874), M78035_T9 (SEQ ID NO:875), M78035_T11 (SEQ ID NO:876), M78035_T17 (SEQ ID NO:877), M78035_T18 (SEQ ID NO:878), M78035_T19 (SEQ ID NO:879) and M78035_T20 (SEQ ID NO:880). Table 55 below describes the starting and ending position of this segment on each transcript.

[3054] Segment cluster M78035_node_{—}50 (SEQ ID NO:915) according to the present invention is supported by 190 libraries. The number of libraries was determined as previously described. This segment can be found in the following transcript(s): M78035_T0 (SEQ ID NO:871), M78035_T3 (SEQ ID NO:872), M78035_T4 (SEQ ID NO:873), M78035_T7 (SEQ ID NO:874), M78035_T9 (SEQ ID NO:875), M78035_T11 (SEQ ID NO:876), M78035_T17 (SEQ ID NO:877), M78035_T18 (SEQ ID NO:878), M78035_T19 (SEQ ID NO:879) and M78035_T20 (SEQ ID NO:880). Table 56 below describes the starting and ending position of this segment on each transcript.

[3055] Segment cluster M78035_node_{—}52 (SEQ ID NO:916) according to the present invention can be found in the following transcript(s): M78035_T0 (SEQ ID NO:871), M78035_T3 (SEQ ID NO:872), M78035_T4 (SEQ ID NO:873), M78035_T7 (SEQ ID NO:874), M78035_T9 (SEQ ID NO:875), M78035_T11 (SEQ ID NO:876), M78035_T17 (SEQ ID NO:877), M78035_T18 (SEQ ID NO:878), M78035_T19 (SEQ ID NO:879) and M78035_T20 (SEQ ID NO:880). Table 57 below describes the starting and ending position of this segment on each transcript.

[3056] Segment cluster M78035_node_{—}53 (SEQ ID NO:917) according to the present invention can be found in the following transcript(s): M78035_T0 (SEQ ID NO:871), M78035_T3 (SEQ ID NO:872), M78035_T4 (SEQ ID NO:873), M78035_T7 (SEQ ID NO:874), M78035_T9 (SEQ ID NO:875), M78035_T11 (SEQ ID NO:876), M78035_T17 (SEQ ID NO:877), M78035_T18 (SEQ ID NO:878), M78035_T19 (SEQ ID NO:879) and M78035_T20 (SEQ ID NO:880). Table 58 below describes the starting and ending position of this segment on each transcript.

[3057] Segment cluster M78035_node_{—}54 (SEQ ID NO:918) according to the present invention is supported by 213 libraries. The number of libraries was determined as previously described. This segment can be found in the following transcript(s): M78035_T0 (SEQ ID NO:871), M78035_T3 (SEQ ID NO:872), M78035_T4 (SEQ ID NO:873), M78035_T7 (SEQ ID NO:874), M78035_T9 (SEQ ID NO:875), M78035_T11 (SEQ ID NO:876), M78035_T17 (SEQ ID NO:877), M78035_T18 (SEQ ID NO:878), M78035_T19 (SEQ ID NO:879) and M78035_T20 (SEQ ID NO:880). Table 59 below describes the starting and ending position of this segment on each transcript.

[3058] Segment cluster M78035_node_{—}56 (SEQ ID NO:919) according to the present invention can be found in the following transcript(s): M78035_T0 (SEQ ID NO:871), M78035_T3 (SEQ ID NO:872), M78035_T4 (SEQ ID NO:873), M78035_T7 (SEQ ID NO:874), M78035_T9 (SEQ ID NO:875) and M78035_T11 (SEQ ID NO:876). Table 60 below describes the starting and ending position of this segment on each transcript.

[3059] Segment cluster M78035_node_{—}57 (SEQ ID NO:920) according to the present invention is supported by 225 libraries. The number of libraries was determined as previously described. This segment can be found in the following transcript(s): M78035_T0 (SEQ ID NO:871), M78035_T3 (SEQ ID NO:872), M78035_T4 (SEQ ID NO:873), M78035_T7 (SEQ ID NO:874), M78035_T9 (SEQ ID NO:875) and M78035_T11 (SEQ ID NO:876). Table 61 below describes the starting and ending position of this segment on each transcript.

[3060] Segment cluster M78035_node_{—}59 (SEQ ID NO:921) according to the present invention is supported by 251 libraries. The number of libraries was determined as previously described. This segment can be found in the following transcript(s): M78035_T0 (SEQ ID NO:871), M78035_T3 (SEQ ID NO:872), M78035_T4 (SEQ ID NO:873), M78035_T7 (SEQ ID NO:874), M78035_T9 (SEQ ID NO:875) and M78035_T11 (SEQ ID NO:876). Table 62 below describes the starting and ending position of this segment on each transcript.

Variant protein alignment to the previously known protein:

Sequence name: SAHH_HUMAN (SEQ ID NO:922)

Sequence Documentation:

Alignment of: M78035_P4 (SEQ ID NO:924)×SAHH_HUMAN (SEQ ID NO:922) ••

Alignment segment 1/1:

Alignment:

Sequence name: SAHH_HUMAN (SEQ ID NO:922)

Sequence Documentation:

Alignment of: M78035_P6 (SEQ ID NO:925)×SAHH_HUMAN (SEQ ID NO:922) ••

Alignment segment 1/1:

Alignment:

Sequence name: SAHH_HUMAN (SEQ ID NO:922)

Sequence Documentation:

Alignment of: M78035_P8 (SEQ ID NO:926)×SAHH_HUMAN (SEQ ID NO:922).

Alignment segment 1/1:

Alignment:

[3061] Expression of S-adenosylhomocysteine hydrolase (AHCY) M78035 transcripts which are detectable by amplicon as depicted in sequence name M78035seg42 (SEQ ID NO:1351) in normal and cancerous colon tissues

[3062] Expression of S-adenosylhomocysteine hydrolase (AHCY) transcripts detectable by or according to seg42, M78035seg42 amplicon (SEQ ID NO:1351) and M78035seg42F (SEQ ID NO:1349) and M78035seg42R (SEQ ID NO:1350) primers was measured by real time PCR. In parallel the expression of four housekeeping genes—PBGD (GenBank Accession No. BC019323 (SEQ ID NO:1576); amplicon—PBGD-amplicon, SEQ ID NO:531), HPRT1 (GenBank Accession No. NM_{—}000194 (SEQ ID NO:1577); amplicon—HPRT1-amplicon, SEQ ID NO:612), G6PD (GenBank Accession No. NM_{—}000402 (SEQ ID NO:1578); G6PD amplicon, SEQ ID NO:615), RPS27A (GenBank Accession No. NM_{—}002954 (SEQ ID NO:1579); RPS27A amplicon, SEQ ID NO:1261), was measured similarly. For each RT sample, the expression of the above amplicon was normalized to the geometric mean of the quantities of the housekeeping genes. The normalized quantity of each RT sample was then divided by the median of the quantities of the normal post-mortem (PM) samples (Sample Nos. 41, 52, 62-67, 69-71, Table 1, above, “Tissue samples in testing panel”), to obtain a value of fold up-regulation for each sample relative to median of the normal PM samples.

[3063] FIG. 55 is a histogram showing over expression of the above-indicated S-adenosylhomocysteine hydrolase (AHCY) transcripts in cancerous colon samples relative to the normal samples. The number and percentage of samples that exhibit at least 3fold over-expression, out of the total number of samples tested is indicated in the bottom.

[3064] As is evident from FIG. 55, the expression of S-adenosylhomocysteine hydrolase (AHCY) transcripts detectable by the above amplicon in cancer samples was significantly higher than in the non-cancerous samples (Sample Nos. 41, 52, 62-67, 69-71, Table 1, “Tissue samples in testing panel”). Notably an over-expression of at least 3 fold was found in 11 out of 37 adenocarcinoma samples,

[3065] Statistical analysis was applied to verify the significance of these results, as described below.

[3066] The P value for the difference in the expression levels of S-adenosylhomocysteine hydrolase (AHCY) transcripts detectable by the above amplicon in colon cancer samples versus the normal tissue samples was determined by T test as 1.03E-04. Threshold of 3 fold overexpression was found to differentiate between cancer and normal samples with P value of 3.76E-02 as checked by exact fisher test. The above values demonstrate statistical significance of the results.

[3067] Primer pairs are also optionally and preferably encompassed within the present invention; for example, for the above experiment, the following primer pair was used as a non-limiting illustrative example only of a suitable primer pair: M78035seg42F forward primer (SEQ ID NO:1349); and M78035seg42R reverse primer (SEQ ID NO:1350).

[3068] The present invention also preferably encompasses any amplicon obtained through the use of any suitable primer pair; for example, for the above experiment, the following amplicon was obtained as a non-limiting illustrative example only of a suitable amplicon: M78035seg42 (SEQ ID NO:1351).

Description for Cluster R30650

[3069] Cluster R30650 features 8 transcript(s) and 49 segment(s) of interest, the names for which are given in Tables 1 and 2, respectively, the sequences themselves are given at the end of the application. The selected protein variants are given in table 3.

[3070] These sequences are variants of the known protein Protein KIAA1199 precursor (SwissProt accession identifier K199_HUMAN), SEQ ID NO: 986, referred to herein as the previously known protein.

[3071] Protein Protein KIAA1199 precursor (SEQ ID NO:986) is known or believed to have the following function(s): May be involved in hearing. The sequence for protein Protein KIAA199 precursor is given at the end of the application, as “Protein KIAA1199 precursor amino acid sequence”. Known polymorphisms for this sequence are as shown in Table 4.

[3072] Cluster R30650 can be used as a diagnostic marker according to overexpression of transcripts of this cluster in cancer. Expression of such transcripts in normal tissues is also given according to the previously described methods. The term “number” in the left hand column of the table and the numbers on the y-axis of the figure below refer to weighted expression of ESTs in each category, as “parts per million” (ratio of the expression of ESTs for a particular cluster to the expression of all ESTs in that category, according to parts per million).

[3073] Overall, the following results were obtained as shown with regard to the histograms in FIG. 56 and Table 5. This cluster is overexpressed (at least at a minimum level) in the following pathological conditions: epithelial malignant tumors and a mixture of malignant tumors from different tissues.

[3074] For this cluster, at least one oligonucleotide was found to demonstrate overexpression of the cluster, although not of at least one transcript/segment as listed below. Microarray (chip) data is also available for this cluster as follows. Various oligonucleotides were tested for being differentially expressed in various disease conditions, particularly cancer, as previously described. The following oligonucleotides were found to hit this cluster but not other segments/transcripts below, shown in Table 7.

[3075] As noted above, cluster R30650 features 8 transcript(s), which were listed in Table 1 above. These transcript(s) encode for protein(s) which are variant(s) of protein Protein KIAA1199 precursor (SEQ ID NO:986). A description of each variant protein according to the present invention is now provided.

[3076] Variant protein R30650_PEA_{—}2_P4 (SEQ ID NO:991) according to the present invention has an amino acid sequence as given at the end of the application; it is encoded by transcript(s) R30650_PEA_{—}2_T2 (SEQ ID NO:929). An alignment is given to the known protein (Protein KIAA1199 precursor (SEQ ID NO:986)) at the end of the application. One or more alignments to one or more previously published protein sequences are given at the end of the application. A brief description of the relationship of the variant protein according to the present invention to each such aligned protein is as follows:

Comparison report between R30650_PEA_{—}2_P4 (SEQ ID NO:991) and Q9ULM1 (SEQ ID NO:989):

[3077] 1. An isolated chimeric polypeptide encoding for R30650_PEA_{—}2_P4 (SEQ ID NO:991), comprising a first amino acid sequence being at least 90% homologous to MYLHIGEEIDGVDMRAEVGLLSRNIIVMGEMEDKCYPYRNHICNFFDFDTFGGHIKFAL GFKAAHLEGTELKHMGQQLVGQYPIHFHLAGDVDERGGYDPPTYIRDLSIHHTFSRCVT VHGSNGLLIKDVVGYNSLGHCFFTEDGPEERNTFDHCLGLLVKSGTLLPSDRDSKMCK MITEDSYPGYIPKPRQDCNAVSTFWMANPNNNLINCAAAGSEETGFWFIFHHVPTGPSV GMYSPGYSEHIPLGKFYNNRAHSNYRAGMIIDNGVKTTEASAKDKRPFLSIISARYSPHQ DADPLKPREPAIIRHFIAYKNQDHGAWLRGGDVWLDSCRFADNGIGLTLASGGTFPYD DGSKQEIKNSLFVGESGNVGTEMMDNRIWGPGGLDHSGRTLPIGQNFPIRGIQLYDGPIN IQNCTFRKFVALEGRHTSALAFRLNNAWQSCPHNNVTGIAFEDVPITSRVFFGEPGPWF NQLDMDGDKTSVFHDVDGSVSEYPGSYLTKNDNWLVRHPDCINVPDWRGAICSGCYA QMYIQAYKTSNLRMKIIKNDFPSHPLYLEGALTRSTHYQQYQPVVTLQKGYTIHWDQT APAELAIWLINFNKGDWIRVGLCYPRGTTFSILSDVHNRLLKQTSKTGVFVRTLQMDKV EQSYPGRSHYYWDEDSGLLFLKLKAQNEREKFAFCSMKGCERIKIKALIPKNAGVSDCT ATAYPKFTERAVVDVPMPKKLFGSQLKTKDHFLEVKMESSKQHFFHLWNDFAYIEVD GKKYPSSEDGIQVVVIDGNQGRVVSHTSFRNSILQGIPWQLFNYVATIPDNSIVLMASKG RYVSRGPWTRVLEKLGADRGLKLKEQMAFVGFKGSFRPIWVTLDTEDHKAKIFQVVPI PVVKKKKL corresponding to amino acids 126-1013 of Q9ULM1 (SEQ ID NO:989), which also corresponds to amino acids 1-888 of R30650_PEA_{—}2_P4 (SEQ ID NO:991).

[3078] Comparison report between R30650_PEA_{—}2_P4 (SEQ ID NO:991) and Q8WUJ3 (SEQ ID NO: 987):

[3079] 1. An isolated chimeric polypeptide encoding for R30650_PEA_{—}2_P4 (SEQ ID NO:991), comprising a first amino acid sequence being at least 90% homologous to MYLHIGEEIDGVDMRAEVGLLSRNIIVMGEMEDKCYPYRNHICNFFDFDTFGGHIKFAL GFKAAHLEGTELKHMGQQLVGQYPIHFHLAGDVDERGGYDPPTYIRDLSIHHTFSRCVT VHGSNGLLIKDVVGYNSLGHCFFTEDGPEERNTFDHCLGLLVKSGTLLPSDRDSKMCK MITEDSYPGYIPKPRQDCNAVSTFWMANPNNNLINCAAAGSEETGFWFIFHHVPTGPSV GMYSPGYSEHIPLGKFYNNRAHSNYRAGMIIDNGVKTTEASAKDKRPFLSIISARYSPHQ DADPLKPREPAIIRHFIAYKNQDHGAWLRGGDVWLDSCRFADNGIGLTLASGGTFPYD DGSKQEIKNSLFVGESGNVGTEMMDNRIWGPGGLDHSGRTLPIGQNFPIRGIQLYDGPIN IQNCTFRKFVALEGRHTSALAFRLNNAWQSCPHNNVTGIAFEDVPITSRVFFGEPGPWF NQLDMDGDKTSVFHDVDGSVSEYPGSYLTKND corresponding to amino acids 474-977 of Q8WUJ3 (SEQ ID NO:987), which also corresponds to amino acids 1-504 of R30650_PEA_{—}2_P4 (SEQ ID NO:991), and a second amino acid sequence being at least 70%, optionally at least 80%, preferably at least 85%, more preferably at least 90% and most preferably at least 95% homologous to a polypeptide having the sequence NWLVRHPDCINVPDWRGAICSGCYAQMYIQAYKTSNLRMKIIKNDFPSHPLYLEGALT RSTHYQQYQPVVTLQKGYTIHWDQTAPAELAIWLINFNKGDWIRVGLCYPRGTTFSILS DVHNRLLKQTSKTGVFVRTLQMDKVEQSYPGRSHYYWDEDSGLLFLKLKAQNEREKF AFCSMKGCERIKIKALIPKNAGVSDCTATAYPKFTERAVVDVPMPKKLFGSQLKTKDHF LEVKMESSKQHFFHLWNDFAYIEVDGKKYPSSEDGIQVVVIDGNQGRVVSHTSFRNSIL QGIPWQLFNYVATIPDNSIVLMASKGRYVSRGPWTRVLEKLGADRGLKLKEQMAFVGF KGSFRPIWVTLDTEDHKAKIFQVVPIPVVKKKKL corresponding to amino acids 505-888 of R30650_PEA_{—}2_P4 (SEQ ID NO:991), wherein said first amino acid sequence and second amino acid sequence are contiguous and in a sequential order.

[3080] 2. An isolated polypeptide encoding for a tail of R30650_PEA_{—}2_P4 (SEQ ID NO:991), comprising a polypeptide being at least 70%, optionally at least about 80%, preferably at least about 85%, more preferably at least about 90% and most preferably at least about 95% homologous to the sequence NWLVRHPDCINVPDWRGAICSGCYAQMYIQAYKTSNLRMKIIKNDFPSHPLYLEGALT RSTHYQQYQPVVTLQKGYTIHWDQTAPAELAIWLINFNKGDWIRVGLCYPRGTTFSILS DVHNRLLKQTSKTGVFVRTLQMDKVEQSYPGRSHYYWDEDSGLLFLKLKAQNEREKF AFCSMKGCERIKIKALIPKNAGVSDCTATAYPKFTERAVVDVPMPKKLFGSQLKTKDHF LEVKMESSKQHFFHLWNDFAYIEVDGKKYPSSEDGIQVVVIDGNQGRVVSHTSFRNSIL QGIPWQLFNYVATIPDNSIVLMASKGRYVSRGPWTRVLEKLGADRGLKLKEQMAFVGF KGSFRPIWVTLDTEDHKAKIFQVVPIPVVKKKKL in R30650_PEA_{—}2_P4 (SEQ ID NO:991).

[3081] Comparison report between R30650_PEA_{—}2_P4 (SEQ ID NO:991) and Q9NPN9 (SEQ ID NO: 988):

[3082] 1. An isolated chimeric polypeptide encoding for R30650_PEA_{—}2_P4 (SEQ ID NO:991), comprising a first amino acid sequence being at least 70%, optionally at least 80%, preferably at least 85%, more preferably at least 90% and most preferably at least 95% homologous to a polypeptide having the sequence MYLHIGEEIDGVDMRAEVGLLSRNIIVMGEMEDKCYPYRNHICNFFDFDTFGGHIKFAL GFKAAHLEGTELKHMGQQLVGQYPIHFHLAGD corresponding to amino acids 1-91 of R30650_PEA_{—}2_P4 (SEQ ID NO:991), and a second amino acid sequence being at least 90% homologous to VDERGGYDPPTYIRDLSIHHTFSRCVTVHGSNGLLIKDVVGYNSLGHCFFTEDGPEERNT FDHCLGLLVKSGTLLPSDRDSKMCKMITEDSYPGYIPKPRQDCNAVSTFWMANPNNNL INCAAAGSEETGFWFIFHHVPTGPSVGMYSPGYSEHIPLGKFYNNRAHSNYRAGMIIDN GVKTTEASAKDKRPFLSIISARYSPHQDADPLKPREPAIIRHFIAYKNQDHGAWLRGGDV WLDSCRFADNGIGLTLASGGTFPYDDGSKQEIKNSLFVGESGNVGTEMMDNRIWGPGG LDHSGRTLPIGQNFPIRGIQLYDGPINIQNCTFRKFVALEGRHTSALAFRLNNAWQSCPH NNVTGIAFEDVPITSRVFFGEPGPWFNQLDMDGDKTSVFHDVDGSVSEYPGSYLTKND NWLVRHPDCINVPDWRGAICSGCYAQMYIQAYKTSNLRMKIIKNDFPSHPLYLEGALT RSTHYQQYQPVVTLQKGYTIHWDQTAPAELAIWLINFNKGDWIRVGLCYPRGTTFSILS DVHNRLLKQTSKTGVFVRTLQMDKVEQSYPGRSHYYWDEDSGLLFLKLKAQNEREKF AFCSMKGCERIKIKALIPKNAGVSDCTATAYPKFTERAVVDVPMPKKLFGSQLKTKDHF LEVKMESSKQHFFHLWNDFAYIEVDGKKYPSSEDGIQVVVIDGNQGRVVSHTSFRNSIL QGIPWQLFNYVATIPDNSIVLMASKGRYVSRGPWTRVLEKLGADRGLKLKEQMAFVGF KGSFRPIWVTLDTEDHKAKIFQVVPIPVVKKKKL corresponding to amino acids 8-804 of Q9NPN9 (SEQ ID NO:988), which also corresponds to amino acids 92-888 of R30650_PEA_{—}2_P4 (SEQ ID NO:991), wherein said first amino acid sequence and second amino acid sequence are contiguous and in a sequential order.

[3083] 2. An isolated polypeptide encoding for a head of R30650_PEA_{—}2_P4 (SEQ ID NO:991), comprising a polypeptide being at least 70%, optionally at least about 80%, preferably at least about 85%, more preferably at least about 90% and most preferably at least about 95% homologous to the sequence MYLHIGEEIDGVDMRAEVGLLSRNIIVMGEMEDKCYPYRNHICNFFDFDTFGGHIKFAL GFKAAHLEGTELKHMGQQLVGQYPIHFHLAGD of R30650_PEA_{—}2_P4 (SEQ ID NO:991)

Comparison report between R30650_PEA_{—}2_P4 (SEQ ID NO:991) and Q9H1K5 (SEQ ID NO:990):

[3084] 1. An isolated chimeric polypeptide encoding for R30650_PEA_{—}2_P4 (SEQ ID NO:991), comprising a first amino acid sequence being at least 70%, optionally at least 80%, preferably at least 85%, more preferably at least 90% and most preferably at least 95% homologous to a polypeptide having the sequence MYLHIGEEIDGVDMRAEVGLLSRNIIVMGEMEDKCYPYRNHICNFFDFDTFGGHIKFAL GFKAAHLEGTELKHMGQQLVGQYPIHFHLAGDVDERGGYDPPTYIRDLSIHHTFSRCVT VHGSNGLLIKDVVGYNSLGHCFFTEDGPEERNTFDHCLGLLVKSGTLLPSDRDSKMCK MITEDSYPGYIPKPRQDCNAVSTFWMANPNNNLINCAAAGSEETGFWFIFHHVPTGPSV GMYSPGYSEHIPLGKFYNNRAHSNYRAGMIIDNGVKTTEASAKDKRPFLSIISARYSPHQ DADPLKPREPAIIRHFIAYKNQDHGAWLRGGDVWLDSCRFADNGIGLTLASGGTFPYD DGSKQEIKNSLFVGESGNVGTEMMDNRIWGPGGLDH corresponding to amino acids 1-389 of R30650_PEA_{—}2_P4 (SEQ ID NO:991), and a second amino acid sequence being at least 90% homologous to SGRTLPIGQNFPIRGIQLYDGPINIQNCTFRKFVALEGRHTSALAFRLNNAWQSCPHNNV TGIAFEDVPITSRVFFGEPGPWFNQLDMDGDKTSVFHDVDGSVSEYPGSYLTKNDNWL VRHPDCINVPDWRGAICSGCYAQMYIQAYKTSNLRMKIIKNDFPSHPLYLEGALTRSTH YQQYQPVVTLQKGYTIHWDQTAPAELAIWLINFNKGDWIRVGLCYPRGTTFSILSDVH NRLLKQTSKTGVFVRTLQMDKVEQSYPGRSHYYWDEDSGLLFLKLKAQNEREKFAFC SMKGCERIKIKALIPKNAGVSDCTATAYPKFTERAVVDVPMPKKLFGSQLKTKDHFLEV KMESSKQHFFHLWNDFAYIEVDGKKYPSSEDGIQVVVIDGNQGRVVSHTSFRNSILQGI PWQLFNYVATIPDNSIVLMASKGRYVSRGPWTRVLEKLGADRGLKLKEQMAFVGFKG SFRPIWVTLDTEDHKAKIFQVVPIPVVKKKKL corresponding to amino acids 2-500 of Q9H1K5 (SEQ ID NO:990), which also corresponds to amino acids 390-888 of R30650_PEA_{—}2_P4 (SEQ ID NO:991), wherein said first amino acid sequence and second amino acid sequence are contiguous and in a sequential order.

[3085] 2. An isolated polypeptide encoding for a head of R30650_PEA_{—}2_P4 (SEQ ID NO:991), comprising a polypeptide being at least 70%, optionally at least about 80%, preferably at least about 85%, more preferably at least about 90% and most preferably at least about 95% homologous to the sequence MYLHIGEEIDGVDMRAEVGLLSRNIIVMGEMEDKCYPYRNHICNFFDFDTFGGHIKFAL GFKAAHLEGTELKHMGQQLVGQYPIHFHLAGDVDERGGYDPPTYIRDLSIHHTFSRCVT VHGSNGLLIKDVVGYNSLGHCFFTEDGPEERNTFDHCLGLLVKSGTLLPSDRDSKMCK MITEDSYPGYIPKPRQDCNAVSTFWMANPNNNLINCAAAGSEETGFWFIFHHVPTGPSV GMYSPGYSEHIPLGKFYNNRAHSNYRAGMIIDNGVKTTEASAKDKRPFLSIISARYSPHQ DADPLKPREPAIIRHFIAYKNQDHGAWLRGGDVWLDSCRFADNGIGLTLASGGTFPYD DGSKQEIKNSLFVGESGNVGTEMMDNRIWGPGGLDH of R30650_PEA_{—}2_P4 (SEQ ID NO:991).

[3086] The location of the variant protein was determined according to results from a number of different software programs and analyses, including analyses from SignalP and other specialized programs. The variant protein is believed to be located as follows with regard to the cell: intracellularly. The protein localization is believed to be intracellularly because neither of the trans-membrane region prediction programs predicted a trans-membrane region for this protein. In addition both signal-peptide prediction programs predict that this protein is a non-secreted protein.

[3087] Variant protein R30650_PEA_{—}2_P4 (SEQ ID NO:991) also has the following non-silent SNPs (Single Nucleotide Polymorphisms) as listed in Table 8, (given according to their position(s) on the amino acid sequence, with the alternative amino acid(s) listed; the last column indicates whether the SNP is known or not; the presence of known SNPs in variant protein R30650_PEA_{—}2_P4 (SEQ ID NO:991) sequence provides support for the deduced sequence of this variant protein according to the present invention).

[3088] Variant protein R30650_PEA_{—}2_P4 (SEQ ID NO:991) is encoded by the following transcript(s): R30650_PEA_{—}2_T2 (SEQ ID NO:929), for which the sequence(s) is/are given at the end of the application. The coding portion of transcript R30650_PEA_{—}2_T2 (SEQ ID NO:929) is shown in bold; this coding portion starts at position 1369 and ends at position 4032. The transcript also has the following SNPs as listed in Table 9 (given according to their position on the nucleotide sequence, with the alternative nucleic acid listed; the last column indicates whether the SNP is known or not; the presence of known SNPs in variant protein R30650_PEA_{—}2_P4 (SEQ ID NO:991) sequence provides support for the deduced sequence of this variant protein according to the present invention).

[3089] Variant protein R30650_PEA_{—}2_P5 (SEQ ID NO:992) according to the present invention has an amino acid sequence as given at the end of the application; it is encoded by transcript(s) R30650_PEA_{—}2_T3 (SEQ ID NO:930). An alignment is given to the known protein (Protein KIAA1199 precursor (SEQ ID NO:986)) at the end of the application. One or more alignments to one or more previously published protein sequences are given at the end of the application. A brief description of the relationship of the variant protein according to the present invention to each such aligned protein is as follows:

[3090] Comparison report between R30650_PEA_{—}2_P5 (SEQ ID NO:992) and Q9ULM1 (SEQ ID NO:989):

[3091] 1. An isolated chimeric polypeptide encoding for R30650_PEA_{—}2_P5 (SEQ ID NO:992), comprising a first amino acid sequence being at least 90% homologous to MDGVNLSTEVVYKKGQDYRFACYDRGRACRSYRVRFLCGKPVRPKLTVTIDTNVNSTI LNLEDNVQSWKPGDTLVIASTDYSMYQAEEFQVLPCRSCAPNQVKVAGKPMYLHIGEE IDGVDMRAEVGLLSRNIIVMGEMEDKCYPYRNHICNFFDFDTFGGHIKFALGFKAAHLE GTELKHMGQQLVGQYPIHFHLAGDVDERGGYDPPTYIRDLSIHHTFSRCVTVHGSNGLL IKDVVGYNSLGHCFFTEDGPEERNTFDHCLGLLVKSGTLLPSDRDSKMCKMITEDSYPG YIPKPRQDCNAVSTFWMANPNNNLINCAAAGSEETGFWFIFHHVPTGPSVGMYSPGYS EHIPLGKFYNNRAHSNYRAGMIIDNGVKTTEASAKDKRPFLSIISARYSPHQDADPLKPR EPAIIRHFIAYKNQDHGAWLRGGDVWLDSCRFADNGIGLTLASGGTFPYDDGSKQEIKN SLFVGESGNVGTEMMDNRIWGPGGLDHSGRTLPIGQNFPIRGIQLYDGPINIQNCTFRKF VALEGRHTSALAFRLNNAWQSCPHNNVTGIAFEDVPITSRVFFGEPGPWFNQLDMDGD KTSVFHDVDGSVSEYPGSYLTKNDNWLVRHPDCINVPDWRGAICSGCYAQMYIQAYK TSNLRMKIIKNDFPSHPLYLEGALTRSTHYQQYQPVVTLQKGYTIHWDQTAPAELAIWL INFNKGDWIRVGLCYPRGTTFSILSDVHNRLLKQTSKTGVFVRTLQMDKVEQSYPGRSH YYWDEDSGLLFLKLKAQNEREKFAFCSMKGCERIKIKALIPKNAGVSDCTATAYPKFTE RAVVDVPMPKKLFGSQLKTKDHFLEVKMESSKQHFFHLWNDFAYIEVDGKKYPSSED GIQVVVIDGNQGRVVSHTSFRNSILQGIPWQLFNYVATIPDNSIVLMASKGRYVSRGPW TRVLEKLGADRGLKLKEQMAFVGFKGSFRPIWVTLDTEDHKAKIFQVVPIPVVKKKKL corresponding to amino acids 18-1013 of Q9ULM1 (SEQ ID NO:989), which also corresponds to amino acids 1-996 of R30650_PEA_{—}2_P5 (SEQ ID NO:992).

[3092] Comparison report between R30650_PEA_{—}2_P5 (SEQ ID NO:992) and Q8WUJ3 (SEQ ID NO:987):

[3093] 1. An isolated chimeric polypeptide encoding for R30650_PEA_{—}2_P5 (SEQ ID NO:992), comprising a first amino acid sequence being at least 90% homologous to MDGVNLSTEVVYKKGQDYRFACYDRGRACRSYRVRFLCGKPVRPKLTVTIDTNVNSTI LNLEDNVQSWKPGDTLVIASTDYSMYQAEEFQVLPCRSCAPNQVKVAGKPMYLHIGEE IDGVDMRAEVGLLSRNIIVMGEMEDKCYPYRNHICNFFDFDTFGGHIKFALGFKAAHLE GTELKHMGQQLVGQYPIHFHLAGDVDERGGYDPPTYIRDLSIHHTFSRCVTVHGSNGLL IKDVVGYNSLGHCFFTEDGPEERNTFDHCLGLLVKSGTLLPSDRDSKMCKMITEDSYPG YIPKPRQDCNAVSTFWMANPNNNLINCAAAGSEETGFWFIFHHVPTGPSVGMYSPGYS EHIPLGKFYNNRAHSNYRAGMIIDNGVKTTEASAKDKRPFLSIISARYSPHQDADPLKPR EPAIIRHFIAYKNQDHGAWLRGGDVWLDSCRFADNGIGLTLASGGTFPYDDGSKQEIKN SLFVGESGNVGTEMMDNRIWGPGGLDHSGRTLPIGQNFPIRGIQLYDGPINIQNCTFRKF VALEGRHTSALAFRLNNAWQSCPHNNVTGIAFEDVPITSRVFFGEPGPWFNQLDMDGD KTSVFHDVDGSVSEYPGSYLTKND corresponding to amino acids 366-977 of Q8WUJ3 (SEQ ID NO:987), which also corresponds to amino acids 1-612 of R30650_PEA_{—}2_P5 (SEQ ID NO:992), and a second amino acid sequence being at least 70%, optionally at least 80%, preferably at least 85%, more preferably at least 90% and most preferably at least 95% homologous to a polypeptide having the sequence NWLVRHPDCINVPDWRGAICSGCYAQMYIQAYKTSNLRMKIIKNDFPSHPLYLEGALT RSTHYQQYQPVVTLQKGYTIHWDQTAPAELAIWLINFNKGDWIRVGLCYPRGTTFSILS DVHNRLLKQTSKTGVFVRTLQMDKVEQSYPGRSHYYWDEDSGLLFLKLKAQNEREKF AFCSMKGCERIKIKALIPKNAGVSDCTATAYPKFTERAVVDVPMPKKLFGSQLKTKDHF LEVKMESSKQHFFHLWNDFAYIEVDGKKYPSSEDGIQVVVIDGNQGRVVSHTSFRNSIL QGIPWQLFNYVATIPDNSIVLMASKGRYVSRGPWTRVLEKLGADRGLKLKEQMAFVGF KGSFRPIWVTLDTEDHKAKIFQVVPIPVVKKKKL corresponding to amino acids 613-996 of R30650_PEA_{—}2_P5 (SEQ ID NO:992), wherein said first amino acid sequence and second amino acid sequence are contiguous and in a sequential order.

[3094] 2. An isolated polypeptide encoding for a tail of R30650_PEA_{—}2_P5 (SEQ ID NO:992), comprising a polypeptide being at least 70%, optionally at least about 80%, preferably at least about 85%, more preferably at least about 90% and most preferably at least about 95% homologous to the sequence NWLVRHPDCINVPDWRGAICSGCYAQMYIQAYKTSNLRMKIIKNDFPSHPLYLEGALT RSTHYQQYQPVVTLQKGYTIHWDQTAPAELAIWLINFNKGDWIRVGLCYPRGTTFSILS DVHNRLLKQTSKTGVFVRTLQMDKVEQSYPGRSHYYWDEDSGLLFLKLKAQNEREKF AFCSMKGCERIKIKALIPKNAGVSDCTATAYPKFTERAVVDVPMPKKLFGSQLKTKDHF LEVKMESSKQHFFHLWNDFAYIEVDGKKYPSSEDGIQVVVIDGNQGRVVSHTSFRNSIL QGIPWQLFNYVATIPDNSIVLMASKGRYVSRGPWTRVLEKLGADRGLKLKEQMAFVGF KGSFRPIWVTLDTEDHKAKIFQVVPIPVVKKKKL in R30650_PEA_{—}2_P5 (SEQ ID NO:992).

[3095] Comparison report between R30650_PEA_{—}2_P5 (SEQ ID NO:992) and Q9NPN9 (SEQ ID NO:988):

[3096] 1. An isolated chimeric polypeptide encoding for R30650_PEA_{—}2_P5 (SEQ ID NO:992), comprising a first amino acid sequence being at least 70%, optionally at least 80%, preferably at least 85%, more preferably at least 90% and most preferably at least 95% homologous to a polypeptide having the sequence MDGVNLSTEVVYKKGQDYRFACYDRGRACRSYRVRFLCGKPVRPKLTVTIDTNVNSTI LNLEDNVQSWKPGDTLVIASTDYSMYQAEEFQVLPCRSCAPNQVKVAGKPMYLHIGEE IDGVDMRAEVGLLSRNIIVMGEMEDKCYPYRNHICNFFDFDTFGGHIKFALGFKAAHLE GTELKHMGQQLVGQYPIHFHLAGD (SEQ ID NO:1468) corresponding to amino acids 1-199 of R30650_PEA_{—}2_P5 (SEQ ID NO:992), and a second amino acid sequence being at least 90% homologous to VDERGGYDPPTYIRDLSIHHTFSRCVTVHGSNGLLIKDVVGYNSLGHCFFTEDGPEERNT FDHCLGLLVKSGTLLPSDRDSKMCKMITEDSYPGYIPKPRQDCNAVSTFWMANPNNNL INCAAAGSEETGFWFIFHHVPTGPSVGMYSPGYSEHIPLGKFYNNRAHSNYRAGMIIDN GVKTTEASAKDKRPFLSIISARYSPHQDADPLKPREPAIIRHFIAYKNQDHGAWLRGGDV WLDSCRFADNGIGLTLASGGTFPYDDGSKQEIKNSLFVGESGNVGTEMMDNRIWGPGG LDHSGRTLPIGQNFPIRGIQLYDGPINIQNCTFRKFVALEGRHTSALAFRLNNAWQSCPH NNVTGIAFEDVPITSRVFFGEPGPWFNQLDMDGDKTSVFHDVDGSVSEYPGSYLTKND NWLVRHPDCINVPDWRGAICSGCYAQMYIQAYKTSNLRMKIIKNDFPSHPLYLEGALT RSTHYQQYQPVVTLQKGYTIHWDQTAPAELAIWLINFNKGDWIRVGLCYPRGTTFSILS DVHNRLLKQTSKTGVFVRTLQMDKVEQSYPGRSHYYWDEDSGLLFLKLKAQNEREKF AFCSMKGCERIKIKALIPKNAGVSDCTATAYPKFTERAVVDVPMPKKLFGSQLKTKDHF LEVKMESSKQHFFHLWNDFAYIEVDGKKYPSSEDGIQVVVIDGNQGRVVSHTSFRNSIL QGIPWQLFNYVATIPDNSIVLMASKGRYVSRGPWTRVLEKLGADRGLKLKEQMAFVGF KGSFRPIWVTLDTEDHKAKIFQVVPIPVVKKKKL corresponding to amino acids 8-804 of Q9NPN9 (SEQ ID NO:988), which also corresponds to amino acids 200-996 of R30650_PEA_{—}2_P5 (SEQ ID NO:992), wherein said first amino acid sequence and second amino acid sequence are contiguous and in a sequential order.

[3097] 2. An isolated polypeptide encoding for a head of R30650_PEA_{—}2_P5 (SEQ ID NO:992), comprising a polypeptide being at least 70%, optionally at least about 80%, preferably at least about 85%, more preferably at least about 90% and most preferably at least about 95% homologous to the sequence MDGVNLSTEVVYKKGQDYRFACYDRGRACRSYRVRFLCGKPVRPKLTVTIDTNVNSTI LNLEDNVQSWKPGDTLVIASTDYSMYQAEEFQVLPCRSCAPNQVKVAGKPMYLHIGEE IDGVDMRAEVGLLSRNIIVMGEMEDKCYPYRNHICNFFDFDTFGGHIKFALGFKAAHLE GTELKHMGQQLVGQYPIHFHLAGD (SEQ ID NO:1468) of R30650_PEA_{—}2_P5 (SEQ ID NO:992).

[3098] Comparison report between R30650_PEA_{—}2_P5 (SEQ ID NO:992) and Q9H1K5 (SEQ ID NO:990):

[3099] 1. An isolated chimeric polypeptide encoding for R30650_PEA_{—}2_P5 (SEQ ID NO:992), comprising a first amino acid sequence being at least 70%, optionally at least 80%, preferably at least 85%, more preferably at least 90% and most preferably at least 95% homologous to a polypeptide having the sequence MDGVNLSTEVVYKKGQDYRFACYDRGRACRSYRVRFLCGKPVRPKLTVTIDTNVNSTI LNLEDNVQSWKPGDTLVIASTDYSMYQAEEFQVLPCRSCAPNQVKVAGKPMYLHIGEE IDGVDMRAEVGLLSRNIIVMGEMEDKCYPYRNHICNFFDFDTFGGHIKFALGFKAAHLE GTELKHMGQQLVGQYPIHFHLAGDVDERGGYDPPTYIRDLSIHHTFSRCVTVHGSNGLL IKDVVGYNSLGHCFFTEDGPEERNTFDHCLGLLVKSGTLLPSDRDSKMCKMITEDSYPG YIPKPRQDCNAVSTFWMANPNNNLINCAAAGSEETGFWFIFHHVPTGPSVGMYSPGYS EHIPLGKFYNNRAHSNYRAGMIIDNGVKTTEASAKDKRPFLSIISARYSPHQDADPLKPR EPAIIRHFIAYKNQDHGAWLRGGDVWLDSCRFADNGIGLTLASGGTFPYDDGSKQEIKN SLFVGESGNVGTEMMDNRIWGPGGLDH corresponding to amino acids 1-497 of R30650_PEA_{—}2_P5 (SEQ ID NO:992), and a second amino acid sequence being at least 90% homologous to SGRTLPIGQNFPIRGIQLYDGPINIQNCTFRKFVALEGRHTSALAFRLNNAWQSCPHNNV TGIAFEDVPITSRVFFGEPGPWFNQLDMDGDKTSVFHDVDGSVSEYPGSYLTKNDNWL VRHPDCINVPDWRGAICSGCYAQMYIQAYKTSNLRMKIIKNDFPSHPLYLEGALTRSTH YQQYQPVVTLQKGYTIHWDQTAPAELAIWLINFNKGDWIRVGLCYPRGTTFSILSDVH NRLLKQTSKTGVFVRTLQMDKVEQSYPGRSHYYWDEDSGLLFLKLKAQNEREKFAFC SMKGCERIKIKALIPKNAGVSDCTATAYPKFTERAVVDVPMPKKLFGSQLKTKDHFLEV KMESSKQHFFHLWNDFAYIEVDGKKYPSSEDGIQVVVIDGNQGRVVSHTSFRNSILQGI PWQLFNYVATIPDNSIVLMASKGRYVSRGPWTRVLEKLGADRGLKLKEQMAFVGFKG SFRPIWVTLDTEDHKAKIFQVVPIPVVKKKKL corresponding to amino acids 2-500 of Q9H1K5 (SEQ ID NO:990), which also corresponds to amino acids 498-996 of R30650_PEA_{—}2_P5 (SEQ ID NO:992), wherein said first amino acid sequence and second amino acid sequence are contiguous and in a sequential order.

[3100] 2. An isolated polypeptide encoding for a head of R30650_PEA_{—}2_P5 (SEQ ID NO:992), comprising a polypeptide being at least 70%, optionally at least about 80%, preferably at least about 85%, more preferably at least about 90% and most preferably at least about 95% homologous to the sequence MDGVNLSTEVVYKKGQDYRFACYDRGRACRSYRVRFLCGKPVRPKLTVTIDTNVNSTI LNLEDNVQSWKPGDTLVIASTDYSMYQAEEFQVLPCRSCAPNQVKVAGKPMYLHIGEE IDGVDMRAEVGLLSRNIIVMGEMEDKCYPYRNHICNFFDFDTFGGHIKFALGFKAAHLE GTELKHMGQQLVGQYPIHFHLAGDVDERGGYDPPTYIRDLSIHHTFSRCVTVHGSNGLL IKDVVGYNSLGHCFFTEDGPEERNTFDHCLGLLVKSGTLLPSDRDSKMCKMITEDSYPG YIPKPRQDCNAVSTFWMANPNNNLINCAAAGSEETGFWFIFHHVPTGPSVGMYSPGYS EHIPLGKFYNNRAHSNYRAGMIIDNGVKTTEASAKDKRPFLSIISARYSPHQDADPLKPR EPAIIRHFIAYKNQDHGAWLRGGDVWLDSCRFADNGIGLTLASGGTFPYDDGSKQEIKN SLFVGESGNVGTEMMDNRIWGPGGLDH of R30650_PEA_{—}2_P5 (SEQ ID NO:992).

[3101] The location of the variant protein was determined according to results from a number of different software programs and analyses, including analyses from SignalP and other specialized programs. The variant protein is believed to be located as follows with regard to the cell: intracellularly. The protein localization is believed to be intracellularly because neither of the trans-membrane region prediction programs predicted a trans-membrane region for this protein. In addition both signal-peptide prediction programs predict that this protein is a non-secreted protein.

[3102] Variant protein R30650_PEA_{—}2_P5 (SEQ ID NO:992) also has the following non-silent SNPs (Single Nucleotide Polymorphisms) as listed in Table 10, (given according to their position(s) on the amino acid sequence, with the alternative amino acid(s) listed; the last column indicates whether the SNP is known or not; the presence of known SNPs in variant protein R30650_PEA_{—}2_P5 (SEQ ID NO:992) sequence provides support for the deduced sequence of this variant protein according to the present invention).

[3103] Variant protein R30650_PEA_{—}2_P5 (SEQ ID NO:992) is encoded by the following transcript(s): R30650_PEA_{—}2_T3 (SEQ ID NO:930), for which the sequence(s) is/are given at the end of the application. The coding portion of transcript R30650_PEA_{—}2_T3 (SEQ ID NO:930) is shown in bold; this coding portion starts at position 532 and ends at position 3519. The transcript also has the following SNPs as listed in Table 11 (given according to their position on the nucleotide sequence, with the alternative nucleic acid listed; the last column indicates whether the SNP is known or not; the presence of known SNPs in variant protein R30650_PEA_{—}2_P5 (SEQ ID NO:992) sequence provides support for the deduced sequence of this variant protein according to the present invention).

[3104] Variant protein R30650_PEA_{—}2_P8 (SEQ ID NO:993) according to the present invention has an amino acid sequence as given at the end of the application; it is encoded by transcript(s) R30650_PEA_{—}2_T6 (SEQ ID NO:931). An alignment is given to the known protein (Protein KIAA 199 precursor (SEQ ID NO:986)) at the end of the application. One or more alignments to one or more previously published protein sequences are given at the end of the application. A brief description of the relationship of the variant protein according to the present invention to each such aligned protein is as follows:

[3105] Comparison report between R30650_PEA_{—}2_P8 (SEQ ID NO:993) and Q9ULM1 (SEQ ID NO:989):

[3106] 1. An isolated chimeric polypeptide encoding for R30650_PEA_{—}2_P8 (SEQ ID NO:993), comprising a first amino acid sequence being at least 70%, optionally at least 80%, preferably at least 85%, more preferably at least 90% and most preferably at least 95% homologous to a polypeptide having the sequence MGAAGRQDFLFKAMLTISWLTLTCFPGATSTVAAGCPDQSPELQPWNPGHDQDHHVHI GQGKTLLLTSSATVYSIHISEGGKLVIKDHDEPIVLRTRHILIDNGGELHAGSALCPFQGN FTIILYGRADEGIQPDPYYGLKYIGVGKGGALELHGQKKLSWTFLNKTLHPGGMAEGG YFFERSWGHRGVIVHVIDPKSGTVIHSDRFDTYRSKKESERLVQYLNAVPDGRILSVAV NDEGSRNLDDMARKAMTKLGSKHFLHLGFRHPWSFLTVKGNPSSSVEDHIEYHGHRG SAAARVFKLFQTEHGEYFNVSLSSEWVQDVEWTEWFDHDKVSQTKGGEKISDLWK corresponding to amino acids 1-348 of R30650_PEA_{—}2_P8 (SEQ ID NO:993), a second amino acid sequence being at least 90% homologous to AHPGKICNRPIDIQATTMDGVNLSTEVVYKKGQDYRFACYDRGRACRSYRVRFLCGKP VRPKLTVTIDTNVNSTILNLEDNVQSWKPGDTLVIASTDYSMYQAEEFQVLPCRSCAPN QVKVAGKPMYLHIGEEIDGVDMRAEVGLLSRNIIVMGEMEDKCYPYRNHICNFFDFDT FGGHIKFALGFKAAHLEGTELKHMGQQLVGQYPIHFHLAGDVDERGGYDPPTYIRDLSI HHTFSRCVTVHGSNGLLIKDVVGYNSLGHCFFTEDGPEERNTFDHCLGLLVKSGTLLPS DRDSKMCKMITEDSYPGYIPKPRQDCNAVSTFWMANPNNNLINCAAAGSEETGFWFIF HHVPTGPSVGMYSPGYSEHIPLGKFYNNRAHSNYRAGMIIDNGVKTTEASAKDKRPFLS IISARYSPHQDADPLKPREPAIIRHFIAYKNQDHGAWLRGGDVWLDSCRFADNGIGLTL ASGGTFPYDDGSKQEIKNSLFVGESGNVGTEMMDNRIWGPGGLDHSGRTLPIGQNFPIR GIQLYDGPINIQNCTFRKFVALEGRHTSALAFRLNNAWQSCPHNNVTGIAFEDVPITSRV FFGEPGPWFNQLDMDGDKTSVFHDVDGSVSEYPGSYLTKNDNWLVRHPDCINVPDWR GAICSGCYAQMYIQAYKTSNLRMKIIKNDFPSHPLYLEGALTRSTHYQQYQPVVTLQKG YTIHWDQTAPAELAIWLINFNKGDWIRVGLCYPRGTTFSILSDVHNRLLKQTSKTGVFV RTLQMDKVEQSYPGRSHYYWDEDSG corresponding to amino acids 1-788 of Q9ULM1 (SEQ ID NO:989), which also corresponds to amino acids 349-1136 of R30650_PEA_{—}2_P8 (SEQ ID NO:993), and a third amino acid sequence being at least 70%, optionally at least 80%, preferably at least 85%, more preferably at least 90% and most preferably at least 95% homologous to a polypeptide having the sequence KQRTISWR (SEQ ID NO:1470) corresponding to amino acids 1137-1144 of R30650_PEA_{—}2_P8 (SEQ ID NO:993), wherein said first amino acid sequence, second amino acid sequence and third amino acid sequence are contiguous and in a sequential order.

[3107] 2. An isolated polypeptide encoding for a head of R30650_PEA_{—}2_P8 (SEQ ID NO:993), comprising a polypeptide being at least 70%, optionally at least about 80%, preferably at least about 85%, more preferably at least about 90% and most preferably at least about 95% homologous to the sequence MGAAGRQDFLFKAMLTISWLTLTCFPGATSTVAAGCPDQSPELQPWNPGHDQDHHVHI GQGKTLLLTSSATVYSIHISEGGKLVIKDHDEPIVLRTRHILIDNGGELHAGSALCPFQGN FTIILYGRADEGIQPDPYYGLKYIGVGKGGALELHGQKKLSWTFLNKTLHPGGMAEGG YFFERSWGHRGVIVHVIDPKSGTVIHSDRFDTYRSKKESERLVQYLNAVPDGRILSVAV NDEGSRNLDDMARKAMTKLGSKHFLHLGFRHPWSFLTVKGNPSSSVEDHIEYHGHRG SAAARVFKLFQTEHGEYFNVSLSSEWVQDVEWTEWFDHDKVSQTKGGEKISDLWK of R30650_PEA_{—}2_P8 (SEQ ID NO:993).

[3108] 3. An isolated polypeptide encoding for a tail of R30650_PEA_{—}2_P8 (SEQ ID NO:993), comprising a polypeptide being at least 70%, optionally at least about 80%, preferably at least about 85%, more preferably at least about 90% and most preferably at least about 95% homologous to the sequence KQRTISWR (SEQ ID NO:1470) in R30650_PEA_{—}2_P8 (SEQ ID NO:993).

[3109] Comparison report between R30650_PEA_{—}2_P8 (SEQ ID NO:993) and Q8WUJ3:

[3110] 1. An isolated chimeric polypeptide encoding for R30650_PEA_{—}2_P8 (SEQ ID NO:993), comprising a first amino acid sequence being at least 90% homologous to MGAAGRQDFLFKAMLTISWLTLTCFPGATSTVAAGCPDQSPELQPWNPGHDQDHHVHI GQGKTLLLTSSATVYSIHISEGGKLVIKDHDEPIVLRTRHILIDNGGELHAGSALCPFQGN FTIILYGRADEGIQPDPYYGLKYIGVGKGGALELHGQKKLSWTFLNKTLHPGGMAEGG YFFERSWGHRGVIVHVIDPKSGTVIHSDRFDTYRSKKESERLVQYLNAVPDGRILSVAV NDEGSRNLDDMARKAMTKLGSKHFLHLGFRHPWSFLTVKGNPSSSVEDHIEYHGHRG SAAARVFKLFQTEHGEYFNVSLSSEWVQDVEWTEWFDHDKVSQTKGGEKISDLWKAH PGKICNRPIDIQATTMDGVNLSTEVVYKKGQDYRFACYDRGRACRSYRVRFLCGKPVR PKLTVTIDTNVNSTILNLEDNVQSWKPGDTLVIASTDYSMYQAEEFQVLPCRSCAPNQV KVAGKPMYLHIGEEIDGVDMRAEVGLLSRNIIVMGEMEDKCYPYRNHICNFFDFDTFG GHIKFALGFKAAHLEGTELKHMGQQLVGQYPIHFHLAGDVDERGGYDPPTYIRDLSIHH TFSRCVTVHGSNGLLIKDVVGYNSLGHCFFTEDGPEERNTFDHCLGLLVKSGTLLPSDR DSKMCKMITEDSYPGYIPKPRQDCNAVSTFWMANPNNNLINCAAAGSEETGFWFIFHH VPTGPSVGMYSPGYSEHIPLGKFYNNRAHSNYRAGMIIDNGVKTTEASAKDKRPFLSIIS ARYSPHQDADPLKPREPAIIRHFIAYKNQDHGAWLRGGDVWLDSCRFADNGIGLTLAS GGTFPYDDGSKQEIKNSLFVGESGNVGTEMMDNRIWGPGGLDHSGRTLPIGQNFPIRGI QLYDGPINIQNCTFRKFVALEGRHTSALAFRLNNAWQSCPHNNVTGIAFEDVPITSRVFF GEPGPWFNQLDMDGDKTSVFHDVDGSVSEYPGSYLTKND corresponding to amino acids 1-977 of Q8WUJ3 (SEQ ID NO:987), which also corresponds to amino acids 1-977 of R30650_PEA_{—}2_P8 (SEQ ID NO:993), and a second amino acid sequence being at least 70%, optionally at least 80%, preferably at least 85%, more preferably at least 90% and most preferably at least 95% homologous to a polypeptide having the sequence NWLVRHPDCINVPDWRGAICSGCYAQMYIQAYKTSNLRMKIIKNDFPSHPLYLEGALT RSTHYQQYQPVVTLQKGYTIHWDQTAPAELAIWLINFNKGDWIRVGLCYPRGTTFSILS DVHNRLLKQTSKTGVFVRTLQMDKVEQSYPGRSHYYWDEDSGKQRTISWR corresponding to amino acids 978-1144 of R30650_PEA_{—}2_P8 (SEQ ID NO:993), wherein said first amino acid sequence and second amino acid sequence are contiguous and in a sequential order.

[3111] 2. An isolated polypeptide encoding for a tail of R30650_PEA_{—}2_P8 (SEQ ID NO:993), comprising a polypeptide being at least 70%, optionally at least about 80%, preferably at least about 85%, more preferably at least about 90% and most preferably at least about 95% homologous to the sequence NWLVRHPDCINVPDWRGAICSGCYAQMYIQAYKTSNLRMKIIKNDFPSHPLYLEGALT RSTHYQQYQPVVTLQKGYTIHWDQTAPAELAIWLINFNKGDWIRVGLCYPRGTTFSILS DVHNRLLKQTSKTGVFVRTLQMDKVEQSYPGRSHYYWDEDSGKQRTISWR in R30650_PEA_{—}2_P8 (SEQ ID NO:993).

[3112] Comparison report between R30650_PEA_{—}2_P8 (SEQ ID NO:993) and Q9NPN9:

[3113] 1. An isolated chimeric polypeptide encoding for R30650_PEA_{—}2_P8 (SEQ ID NO:993), comprising a first amino acid sequence being at least 70%, optionally at least 80%, preferably at least 85%, more preferably at least 90% and most preferably at least 95% homologous to a polypeptide having the sequence MGAAGRQDFLFKAMLTISWLTLTCFPGATSTVAAGCPDQSPELQPWNPGHDQDHHVHI GQGKTLLLTSSATVYSIHISEGGKLVIKDHDEPIVLRTRHILIDNGGELHAGSALCPFQGN FTIILYGRADEGIQPDPYYGLKYIGVGKGGALELHGQKKLSWTFLNKTLHPGGMAEGG YFFERSWGHRGVIVHVIDPKSGTVIHSDRFDTYRSKKESERLVQYLNAVPDGRILSVAV NDEGSRNLDDMARKAMTKLGSKHFLHLGFRHPWSFLTVKGNPSSSVEDHIEYHGHRG SAAARVFKLFQTEHGEYFNVSLSSEWVQDVEWTEWFDHDKVSQTKGGEKISDLWKAH PGKICNRPIDIQATTMDGVNLSTEVVYKKGQDYRFACYDRGRACRSYRVRFLCGKPVR PKLTVTIDTNVNSTILNLEDNVQSWKPGDTLVIASTDYSMYQAEEFQVLPCRSCAPNQV KVAGKPMYLHIGEEIDGVDMRAEVGLLSRNIIVMGEMEDKCYPYRNHICNFFDFDTFG GHIKFALGFKAAHLEGTELKHMGQQLVGQYPIHFHLAGD corresponding to amino acids 1-564 of R30650_PEA_{—}2_P8 (SEQ ID NO:993), a second amino acid sequence being at least 90% homologous to VDERGGYDPPTYIRDLSIHHTFSRCVTVHGSNGLLIKDVVGYNSLGHCFFTEDGPEERNT FDHCLGLLVKSGTLLPSDRDSKMCKMITEDSYPGYIPKPRQDCNAVSTFWMANPNNNL INCAAAGSEETGFWFIFHHVPTGPSVGMYSPGYSEHIPLGKFYNNRAHSNYRAGMIIDN GVKTTEASAKDKRPFLSIISARYSPHQDADPLKPREPAIIRHFIAYKNQDHGAWLRGGDV WLDSCRFADNGIGLTLASGGTFPYDDGSKQEIKNSLFVGESGNVGTEMMDNRIWGPGG LDHSGRTLPIGQNFPIRGIQLYDGPINIQNCTFRKFVALEGRHTSALAFRLNNAWQSCPH NNVTGIAFEDVPITSRVFFGEPGPWFNQLDMDGDKTSVFHDVDGSVSEYPGSYLTKND NWLVRHPDCINVPDWRGAICSGCYAQMYIQAYKTSNLRMKIIKNDFPSHPLYLEGALT RSTHYQQYQPVVTLQKGYTIHWDQTAPAELAIWLINFNKGDWIRVGLCYPRGTTFSILS DVHNRLLKQTSKTGVFVRTLQMDKVEQSYPGRSHYYWDEDSG corresponding to amino acids 8-579 of Q9NPN9 (SEQ ID NO:988), which also corresponds to amino acids 565-1136 of R30650_PEA_{—}2_P8 (SEQ ID NO:993), and a third amino acid sequence being at least 70%, optionally at least 80%, preferably at least 85%, more preferably at least 90% and most preferably at least 95% homologous to a polypeptide having the sequence KQRTISWR (SEQ ID NO:1470) corresponding to amino acids 1137-1144 of R30650_PEA_{—}2_P8 (SEQ ID NO:993), wherein said first amino acid sequence, second amino acid sequence and third amino acid sequence are contiguous and in a sequential order.

[3114] 2. An isolated polypeptide encoding for a head of R30650_PEA_{—}2_P8 (SEQ ID NO:993), comprising a polypeptide being at least 70%, optionally at least about 80%, preferably at least about 85%, more preferably at least about 90% and most preferably at least about 95% homologous to the sequence MGAAGRQDFLFKAMLTISWLTLTCFPGATSTVAAGCPDQSPELQPWNPGHDQDHHVHI GQGKTLLLTSSATVYSIHISEGGKLVIKDHDEPIVLRTRHILIDNGGELHAGSALCPFQGN FTIILYGRADEGIQPDPYYGLKYIGVGKGGALELHGQKKLSWTFLNKTLHPGGMAEGG YFFERSWGHRGVIVHVIDPKSGTVIHSDRFDTYRSKKESERLVQYLNAVPDGRILSVAV NDEGSRNLDDMARKAMTKLGSKHFLHLGFRHPWSFLTVKGNPSSSVEDHIEYHGHRG SAAARVFKLFQTEHGEYFNVSLSSEWVQDVEWTEWFDHDKVSQTKGGEKISDLWKAH PGKICNRPIDIQATTMDGVNLSTEVVYKKGQDYRFACYDRGRACRSYRVRFLCGKPVR PKLTVTIDTNVNSTILNLEDNVQSWKPGDTLVIASTDYSMYQAEEFQVLPCRSCAPNQV KVAGKPMYLHIGEEIDGVDMRAEVGLLSRNIIVMGEMEDKCYPYRNHICNFFDFDTFG GHIKFALGFKAAHLEGTELKHMGQQLVGQYPIHFHLAGD of R30650_PEA_{—}2_P8 (SEQ ID NO:993).

[3115] 3. An isolated polypeptide encoding for a tail of R30650_PEA_{—}2_P8 (SEQ ID NO:993), comprising a polypeptide being at least 70%, optionally at least about 80%, preferably at least about 85%, more preferably at least about 90% and most preferably at least about 95% homologous to the sequence KQRTISWR (SEQ ID NO:1470) in R30650_PEA_{—}2_P8 (SEQ ID NO:993).

[3116] Comparison report between R30650_PEA_{—}2_P8 (SEQ ID NO:993) and Q9H1K5:

[3117] 1. An isolated chimeric polypeptide encoding for R30650_PEA_{—}2_P8 (SEQ ID NO:993), comprising a first amino acid sequence being at least 70%, optionally at least 80%, preferably at least 85%, more preferably at least 90% and most preferably at least 95% homologous to a polypeptide having the sequence MGAAGRQDFLFKAMLTISWLTLTCFPGATSTVAAGCPDQSPELQPWNPGHDQDHHVHI GQGKTLLLTSSATVYSIHISEGGKLVIKDHDEPIVLRTRHILIDNGGELHAGSALCPFQGN FTIILYGRADEGIQPDPYYGLKYIGVGKGGALELHGQKKLSWTFLNKTLHPGGMAEGG YFFERSWGHRGVIVHVIDPKSGTVIHSDRFDTYRSKKESERLVQYLNAVPDGRILSVAV NDEGSRNLDDMARKAMTKLGSKHFLHLGFRHPWSFLTVKGNPSSSVEDHIEYHGHRG SAAARVFKLFQTEHGEYFNVSLSSEWVQDVEWTEWFDHDKVSQTKGGEKISDLWKAH PGKICNRPIDIQATTMDGVNLSTEVVYKKGQDYRFACYDRGRACRSYRVRFLCGKPVR PKLTVTIDTNVNSTILNLEDNVQSWKPGDTLVIASTDYSMYQAEEFQVLPCRSCAPNQV KVAGKPMYLHIGEEIDGVDMRAEVGLLSRNIIVMGEMEDKCYPYRNHICNFFDFDTFG GHIKFALGFKAAHLEGTELKHMGQQLVGQYPIHFHLAGDVDERGGYDPPTYIRDLSIHH TFSRCVTVHGSNGLLIKDVVGYNSLGHCFFTEDGPEERNTFDHCLGLLVKSGTLLPSDR DSKMCKMITEDSYPGYIPKPRQDCNAVSTFWMANPNNNLINCAAAGSEETGFWFIFHH VPTGPSVGMYSPGYSEHIPLGKFYNNRAHSNYRAGMIIDNGVKTTEASAKDKRPFLSIIS ARYSPHQDADPLKPREPAIIRHFIAYKNQDHGAWLRGGDVWLDSCRFADNGIGLTLAS GGTFPYDDGSKQEIKNSLFVGESGNVGTEMMDNRIWGPGGLDH corresponding to amino acids 1-862 of R30650_PEA_{—}2_P8 (SEQ ID NO:993), a second amino acid sequence being at least 90% homologous to SGRTLPIGQNFPIRGIQLYDGPINIQNCTFRKFVALEGRHTSALAFRLNNAWQSCPHNNV TGIAFEDVPITSRVFFGEPGPWFNQLDMDGDKTSVFHDVDGSVSEYPGSYLTKNDNWL VRHPDCINVPDWRGAICSGCYAQMYIQAYKTSNLRMKIIKNDFPSHPLYLEGALTRSTH YQQYQPVVTLQKGYTIHWDQTAPAELAIWLINFNKGDWIRVGLCYPRGTTFSILSDVH NRLLKQTSKTGVFVRTLQMDKVEQSYPGRSHYYWDEDSG corresponding to amino acids 2-275 of Q9H1K5 (SEQ ID NO:990), which also corresponds to amino acids 863-1136 of R30650_PEA_{—}2_P8 (SEQ ID NO:993), and a third amino acid sequence being at least 70%, optionally at least 80%, preferably at least 85%, more preferably at least 90% and most preferably at least 95% homologous to a polypeptide having the sequence KQRTISWR (SEQ ID NO:1470) corresponding to amino acids 1137-1144 of R30650_PEA_{—}2_P8 (SEQ ID NO:993), wherein said first amino acid sequence, second amino acid sequence and third amino acid sequence are contiguous and in a sequential order.

[3118] 2. An isolated polypeptide encoding for a head of R30650_PEA_{—}2_P8 (SEQ ID NO:993), comprising a polypeptide being at least 70%, optionally at least about 80%, preferably at least about 85%, more preferably at least about 90% and most preferably at least about 95% homologous to the sequence MGAAGRQDFLFKAMLTISWLTLTCFPGATSTVAAGCPDQSPELQPWNPGHDQDHHVHI GQGKTLLLTSSATVYSIHISEGGKLVIKDHDEPUVLRTRHILIDNGGELHAGSALCPFQGN FTIILYGRADEGIQPDPYYGLKYIGVGKGGALELHGQKKLSWTFLNKTLHPGGMAEGG YFFERSWGHRGVIVHVIDPKSGTVIHSDRFDTYRSKKESERLVQYLNAVPDGRILSVAV NDEGSRNLDDMARKAMTKLGSKHFLHLGFRHPWSFLTVKGNPSSSVEDHIEYHGHRG SAAARVFKLFQTEHGEYFNVSLSSEWVQDVEWTEWFDHDKVSQTKGGEKISDLWKAH PGKICNRPIDIQATTMDGVNLSTEVVYKKGQDYRFACYDRGRACRSYRVRFLCGKPVR PKLTVTIDTNVNSTILNLEDNVQSWKPGDTLVIASTDYSMYQAEEFQVLPCRSCAPNQV KVAGKPMYLHIGEEIDGVDMRAEVGLLSRNIIVMGEMEDKCYPYRNHICNFFDFDTFG GHIKFALGFKAAHLEGTELKHMGQQLVGQYPIHFHLAGDVDERGGYDPPTYIRDLSIHH TFSRCVTVHGSNGLLIKDVVGYNSLGHCFFTEDGPEERNTFDHCLGLLVKSGTLLPSDR DSKMCKMITEDSYPGYIPKPRQDCNAVSTFWMANPNNNLINCAAAGSEETGFWFIFHH VPTGPSVGMYSPGYSEHIPLGKFYNNRAHSNYRAGMIIDNGVKTTEASAKDKRPFLSIIS ARYSPHQDADPLKPREPAIIRHFIAYKNQDHGAWLRGGDVWLDSCRFADNGIGLTLAS GGTFPYDDGSKQEIKNSLFVGESGNVGTEMMDNRIWGPGGLDH of R30650_PEA_{—}2_P8 (SEQ ID NO:993).

[3119] 3. An isolated polypeptide encoding for a tail of R30650_PEA_{—}2_P8 (SEQ ID NO:993), comprising a polypeptide being at least 70%, optionally at least about 80%, preferably at least about 85%, more preferably at least about 90% and most preferably at least about 95% homologous to the sequence KQRTISWR (SEQ ID NO:1470) in R30650_PEA_{—}2_P8 (SEQ ID NO:993).

[3120] The location of the variant protein was determined according to results from a number of different software programs and analyses, including analyses from SignalP and other specialized programs. The variant protein is believed to be located as follows with regard to the cell: secreted. The protein localization is believed to be secreted because both signal-peptide prediction programs predict that this protein has a signal peptide, and neither trans-membrane region prediction program predicts that this protein has a trans-membrane region.

[3121] Variant protein R30650_PEA_{—}2_P8 (SEQ ID NO:993) also has the following non-silent SNPs (Single Nucleotide Polymorphisms) as listed in Table 12, (given according to their position(s) on the amino acid sequence, with the alternative amino acid(s) listed; the last column indicates whether the SNP is known or not; the presence of known SNPs in variant protein R30650_PEA_{—}2_P8 (SEQ ID NO:993) sequence provides support for the deduced sequence of this variant protein according to the present invention).

[3122] Variant protein R30650_PEA_{—}2_P8 (SEQ ID NO:993) is encoded by the following transcript(s): R30650_PEA_{—}2_T6 (SEQ ID NO:931), for which the sequence(s) is/are given at the end of the application. The coding portion of transcript R30650_PEA_{—}2_T6 (SEQ ID NO:931) is shown in bold; this coding portion starts at position 265 and ends at position 3696. The transcript also has the following SNPs as listed in Table 13 (given according to their position on the nucleotide sequence, with the alternative nucleic acid listed; the last column indicates whether the SNP is known or not; the presence of known SNPs in variant protein R30650_PEA_{—}2_P8 (SEQ ID NO:993) sequence provides support for the deduced sequence of this variant protein according to the present invention).

[3123] Variant protein R30650_PEA_{—}2_P12 (SEQ ID NO:994) according to the present invention has an amino acid sequence as given at the end of the application; it is encoded by transcript(s) R30650_PEA_{—}2_T14 (SEQ ID NO:932). The location of the variant protein was determined according to results from a number of different software programs and analyses, including analyses from SignalP and other specialized programs. The variant protein is believed to be located as follows with regard to the cell: intracellularly. The protein localization is believed to be intracellularly because neither of the trans-membrane region prediction programs predicted a trans-membrane region for this protein. In addition both signal-peptide prediction programs predict that this protein is a non-secreted protein.

[3124] Variant protein R30650_PEA_{—}2_P12 (SEQ ID NO:994) is encoded by the following transcript(s): R30650_PEA_{—}2_T14 (SEQ ID NO:932), for which the sequence(s) is/are given at the end of the application. The coding portion of transcript R30650_PEA_{—}2_T14 (SEQ ID NO:932) is shown in bold; this coding portion starts at position 1543 and ends at position 1719. The transcript also has the following SNPs as listed in Table 14 (given according to their position on the nucleotide sequence, with the alternative nucleic acid listed; the last column indicates whether the SNP is known or not; the presence of known SNPs in variant protein R30650_PEA_{—}2_P12 (SEQ ID NO:994) sequence provides support for the deduced sequence of this variant protein according to the present invention).

[3125] Variant protein R30650_PEA_{—}2_P13 (SEQ ID NO:995) according to the present invention has an amino acid sequence as given at the end of the application; it is encoded by transcript(s) R30650_PEA_{—}2_T15 (SEQ ID NO:933) and R30650_PEA_{—}2_T21 (SEQ ID NO:935). The location of the variant protein was determined according to results from a number of different software programs and analyses, including analyses from SignalP and other specialized programs. The variant protein is believed to be located as follows with regard to the cell: intracellularly. The protein localization is believed to be intracellularly because neither of the trans-membrane region prediction programs predicted a trans-membrane region for this protein. In addition both signal-peptide prediction programs predict that this protein is a non-secreted protein.

[3126] Variant protein R30650_PEA_{—}2_P13 (SEQ ID NO:995) is encoded by the following transcript(s): R30650_PEA_{—}2_T15 (SEQ ID NO:933) and R30650_PEA_{—}2_T21 (SEQ ID NO:935), for which the sequence(s) is/are given at the end of the application.

[3127] The coding portion of transcript R30650_PEA_{—}2_T15 (SEQ ID NO:933) is shown in bold; this coding portion starts at position 1543 and ends at position 1713. The transcript also has the following SNPs as listed in Table 15 (given according to their position on the nucleotide sequence, with the alternative nucleic acid listed; the last column indicates whether the SNP is known or not; the presence of known SNPs in variant protein R30650_PEA_{—}2_P13 (SEQ ID NO:995) sequence provides support for the deduced sequence of this variant protein according to the present invention).

[3128] The coding portion of transcript R30650_PEA_{—}2_T21 (SEQ ID NO:935) is shown in bold; this coding portion starts at position 1543 and ends at position 1713. The transcript also has the following SNPs as listed in Table 16 (given according to their position on the nucleotide sequence, with the alternative nucleic acid listed; the last column indicates whether the SNP is known or not; the presence of known SNPs in variant protein R30650_PEA_{—}2_P13 (SEQ ID NO:995) sequence provides support for the deduced sequence of this variant protein according to the present invention).

[3129] Variant protein R30650_PEA_{—}2_P15 (SEQ ID NO:996) according to the present invention has an amino acid sequence as given at the end of the application; it is encoded by transcript(s) R30650_PEA_{—}2_T18 (SEQ ID NO:934). An alignment is given to the known protein (Protein KIAA1199 precursor (SEQ ID NO:986)) at the end of the application. One or more alignments to one or more previously published protein sequences are given at the end of the application. A brief description of the relationship of the variant protein according to the present invention to each such aligned protein is as follows:

[3130] Comparison report between R30650_PEA_{—}2_P15 (SEQ ID NO:996) and Q9ULM (SEQ ID NO:989):

[3131] 1. An isolated chimeric polypeptide encoding for R30650_PEA_{—}2_P15 (SEQ ID NO:996) comprising a first amino acid sequence being at least 70%, optionally at least 80%, preferably at least 85%, more preferably at least 90% and most preferably at least 95% homologous to a polypeptide having the sequence MGAAGRQDFLFKAMLTISWLTLTCFPGATSTVAAGCPDQSPELQPWNPGHDQDHHVHI GQGKTLLLTSSATVYSIHISEGGKLVIKDHDEPIVLRTRHILIDNGGELHAGSALCPFQGN FTIILYGRADEGIQPDPYYGLKYIGVGKGGALELHGQKKLSWTFLNKTLHPGGMAEGG YFFERSWGHRGVIVHVIDPKSGTVIHSDRFDTYRSKKESERLVQYLNAVPDGRILSVAV NDEGSRNLDDMARKAMTKLGSKHFLHLGFRHPWSFLTVKGNPSSSVEDHIEYHGHRG SAAARVFKLFQTEHGEYFNVSLSSEWVQDVEWTEWFDHDKVSQTKGGEKISDLWK corresponding to amino acids 1-348 of R30650_PEA_{—}2_P15 (SEQ ID NO:996), and a second amino acid sequence being at least 90% homologous to AHPGKICNRPIDIQATTMDGVNLSTEVVYKKGQDYRFACYDRGRACRSYRVRFLCGKP VRPKLTVTIDTNVNSTILNLEDNVQSWKPGDTLVIASTDYSMYQAEEFQVLPCRSCAPN QVKVAGKPMYLHIGEEIDGVDMRAEVGLLSRNIIVMGEMEDKCYPYRNHICNFFDFDT FGGHIKFALGFKAAHLEGTELKHMGQQLVGQYPIHFHLAGDVDERGGYDPPTYIRDLSI HHTFSRCVTVHGSNGLLIKDVVGYNSLGHCFFTEDGPEERNTFDHCLGLLVKSGTLLPS DRDSKMCKMITEDSYPGYIPKPRQDCNAVSTFWMANPNNNLINCAAAGSEETGFWFIF HHVPTGPSVGMYSPGYSEHIPLGKFYNNRAHSNYRAGMIIDNGVKTTEASAKDKRPFLS IISARYSPHQDADPLKPREPAIIRHFIAYKNQDHGAWLRGGDVWLDSCRFADNGIGLTL ASGGTFPYDDGSKQEIKNSLFVGESGNVGTEMMDNRIWGPGGLDHSGRTLPIGQNFPIR GIQLYDGPINIQNCTFRKFVALEGRHTSALAFRLNNAWQSCPHNNVTGIAFEDVPITSRV FFGEPGPWFNQLDMDGDKTSVFHDVDGSVSEYPGSYLTKNDNWLVRHPDCINVPDWR GAICSGCYAQMYIQAYKTSNLRMKIIKNDFPSHPLYLEGALTRSTHYQQYQPVVTLQKG YTIHWDQTAPAELAIWLINFNKGDWIRVGLCYPRGTTFSILSDVHNRLLKQTSKTGVFV RTLQMDKVEQSYPGRSHYYWDEDSG corresponding to amino acids 1-788 of Q9ULM1 (SEQ ID NO:989), which also corresponds to amino acids 349-1136 of R30650_PEA_{—}2_P15 (SEQ ID NO:996), wherein said first amino acid sequence and second amino acid sequence are contiguous and in a sequential order.

[3132] 2. An isolated polypeptide encoding for a head of R30650_PEA_{—}2_P15 (SEQ ID NO:996), comprising a polypeptide being at least 70%, optionally at least about 80%, preferably at least about 85%, more preferably at least about 90% and most preferably at least about 95% homologous to the sequence MGAAGRQDFLFKAMLTISWLTLTCFPGATSTVAAGCPDQSPELQPWNPGHDQDHHVHI GQGKTLLLTSSATVYSIHISEGGKLVIKDHDEPIVLRTRHILIDNGGELHAGSALCPFQGN FTIILYGRADEGIQPDPYYGLKYIGVGKGGALELHGQKKLSWTFLNKTLHPGGMAEGG YFFERSWGHRGVIVHVIDPKSGTVIHSDRFDTYRSKKESERLVQYLNAVPDGRILSVAV NDEGSRNLDDMARKAMTKLGSKHFLHLGFRHPWSFLTVKGNPSSSVEDHIEYHGHRG SAAARVFKLFQTEHGEYFNVSLSSEWVQDVEWTEWFDHDKVSQTKGGEKISDLWK of R30650_PEA_{—}2_P15 (SEQ ID NO:996).

[3133] Comparison report between R30650_PEA_{—}2_P15 (SEQ ID NO:996) and Q8WUJ3 (SEQ ID NO:987):

[3134] 1. An isolated chimeric polypeptide encoding for R30650_PEA_{—}2_P15 (SEQ ID NO:996) comprising a first amino acid sequence being at least 90% homologous to MGAAGRQDFLFKAMLTISWLTLTCFPGATSTVAAGCPDQSPELQPWNPGHDQDHHVHI GQGKTLLLTSSATVYSIHISEGGKLVIKDHDEPIVLRTRHILIDNGGELHAGSALCPFQGN FTIILYGRADEGIQPDPYYGLKYIGVGKGGALELHGQKKLSWTFLNKTLHPGGMAEGG YFFERSWGHRGVIVHVIDPKSGTVIHSDRFDTYRSKKESERLVQYLNAVPDGRILSVAV NDEGSRNLDDMARKAMTKLGSKHFLHLGFRHPWSFLTVKGNPSSSVEDHIEYHGHRG SAAARVFKLFQTEHGEYFNVSLSSEWVQDVEWTEWFDHDKVSQTKGGEKISDLWKAH PGKICNRPIDIQATTMDGVNLSTEVVYKKGQDYRFACYDRGRACRSYRVRFLCGKPVR PKLTVTIDTNVNSTILNLEDNVQSWKPGDTLVIASTDYSMYQAEEFQVLPCRSCAPNQV KVAGKPMYLHIGEEIDGVDMRAEVGLLSRNIIVMGEMEDKCYPYRNHICNFFDFDTFG GHIKFALGFKAAHLEGTELKHMGQQLVGQYPIHFHLAGDVDERGGYDPPTYIRDLSIHH TFSRCVTVHGSNGLLIKDVVGYNSLGHCFFTEDGPEERNTFDHCLGLLVKSGTLLPSDR DSKMCKMITEDSYPGYIPKPRQDCNAVSTFWMANPNNNLINCAAAGSEETGFWFIFHH VPTGPSVGMYSPGYSEHIPLGKFYNNRAHSNYRAGMIIDNGVKTTEASAKDKRPFLSIIS ARYSPHQDADPLKPREPAIIRHFIAYKNQDHGAWLRGGDVWLDSCRFADNGIGLTLAS GGTFPYDDGSKQEIKNSLFVGESGNVGTEMMDNRIWGPGGLDHSGRTLPIGQNFPIRGI QLYDGPINIQNCTFRKFVALEGRHTSALAFRLNNAWQSCPHNNVTGIAFEDVPITSRVFF GEPGPWFNQLDMDGDKTSVFHDVDGSVSEYPGSYLTKND corresponding to amino acids 1-977 of Q8WUJ3 (SEQ ID NO:987), which also corresponds to amino acids 1-977 of R30650_PEA_{—}2_P15 (SEQ ID NO:996), and a second amino acid sequence being at least 70%, optionally at least 80%, preferably at least 85%, more preferably at least 90% and most preferably at least 95% homologous to a polypeptide having the sequence NWLVRHPDCINVPDWRGAICSGCYAQMYIQAYKTSNLRMKIIKNDFPSHPLYLEGALT RSTHYQQYQPVVTLQKGYTIHWDQTAPAELAIWLINFNKGDWIRVGLCYPRGTTFSILS DVHNRLLKQTSKTGVFVRTLQMDKVEQSYPGRSHYYWDEDSG corresponding to amino acids 978-1136 of R30650_PEA_{—}2_P15 (SEQ ID NO:996), wherein said first amino acid sequence and second amino acid sequence are contiguous and in a sequential order.

[3135] 2. An isolated polypeptide encoding for a tail of R30650_PEA_{—}2_P15 (SEQ ID NO:996), comprising a polypeptide being at least 70%, optionally at least about 80%, preferably at least about 85%, more preferably at least about 90% and most preferably at least about 95% homologous to the sequence NWLVRHPDCINVPDWRGAICSGCYAQMYIQAYKTSNLRMKIIKNDFPSHPLYLEGALT RSTHYQQYQPVVTLQKGYTIHWDQTAPAELAIWLINFNKGDWIRVGLCYPRGTTFSILS DVHNRLLKQTSKTGVFVRTLQMDKVEQSYPGRSHYYWDEDSG in R30650_PEA_{—}2_P15 (SEQ ID NO:996).

[3136] Comparison report between R30650_PEA_{—}2_P15 (SEQ ID NO:996) and Q9NPN9 (SEQ ID NO:988):

[3137] 1. An isolated chimeric polypeptide encoding for R30650_PEA_{—}2_P15 (SEQ ID NO:996) comprising a first amino acid sequence being at least 70%, optionally at least 80%, preferably at least 85%, more preferably at least 90% and most preferably at least 95% homologous to a polypeptide having the sequence MGAAGRQDFLFKAMLTISWLTLTCFPGATSTVAAGCPDQSPELQPWNPGHDQDHHVHI GQGKTLLLTSSATVYSIHISEGGKLVIKDHDEPIVLRTRHILIDNGGELHAGSALCPFQGN FTIILYGRADEGIQPDPYYGLKYIGVGKGGALELHGQKKLSWTFLNKTLHPGGMAEGG YFFERSWGHRGVIVHVIDPKSGTVIHSDRFDTYRSKKESERLVQYLNAVPDGRILSVAV NDEGSRNLDDMARKAMTKLGSKHFLHLGFRHPWSFLTVKGNPSSSVEDHIEYHGHRG SAAARVFKLFQTEHGEYFNVSLSSEWVQDVEWTEWFDHDKVSQTKGGEKISDLWKAH PGKICNRPIDIQATTMDGVNLSTEVVYKKGQDYRFACYDRGRACRSYRVRFLCGKPVR PKLTVTIDTNVNSTILNLEDNVQSWKPGDTLVIASTDYSMYQAEEFQVLPCRSCAPNQV KVAGKPMYLHIGEEIDGVDMRAEVGLLSRNIIVMGEMEDKCYPYRNHICNFFDFDTFG GHIKFALGFKAAHLEGTELKHMGQQLVGQYPIHFHLAGD corresponding to amino acids 1-564 of R30650_PEA_{—}2_P15 (SEQ ID NO:996), and a second amino acid sequence being at least 90% homologous to VDERGGYDPPTYIRDLSIHHTFSRCVTVHGSNGLLIKDVVGYNSLGHCFFTEDGPEERNT FDHCLGLLVKSGTLLPSDRDSKMCKMITEDSYPGYIPKPRQDCNAVSTFWMANPNNNL INCAAAGSEETGFWFIFHHVPTGPSVGMYSPGYSEHIPLGKFYNNRAHSNYRAGMIIDN GVKTTEASAKDKRPFLSIISARYSPHQDADPLKPREPAIIRHFIAYKNQDHGAWLRGGDV WLDSCRFADNGIGLTLASGGTFPYDDGSKQEIKNSLFVGESGNVGTEMMDNRIWGPGG LDHSGRTLPIGQNFPIRGIQLYDGPINIQNCTFRKFVALEGRHTSALAFRLNNAWQSCPH NNVTGIAFEDVPITSRVFFGEPGPWFNQLDMDGDKTSVFHDVDGSVSEYPGSYLTKND NWLVRHPDCINVPDWRGAICSGCYAQMYIQAYKTSNLRMKIIKNDFPSHPLYLEGALT RSTHYQQYQPVVTLQKGYTIHWDQTAPAELAIWLINFNKGDWIRVGLCYPRGTTFSILS DVHNRLLKQTSKTGVFVRTLQMDKVEQSYPGRSHYYWDEDSG corresponding to amino acids 8-579 of Q9NPN9 (SEQ ID NO:988), which also corresponds to amino acids 565-1136 of R30650_PEA_{—}2_P15 (SEQ ID NO:996), wherein said first amino acid sequence and second amino acid sequence are contiguous and in a sequential order.

[3138] 2. An isolated polypeptide encoding for a head of R30650_PEA_{—}2_P15 (SEQ ID NO:996), comprising a polypeptide being at least 70%, optionally at least about 80%, preferably at least about 85%, more preferably at least about 90% and most preferably at least about 95% homologous to the sequence MGAAGRQDFLFKAMLTISWLTLTCFPGATSTVAAGCPDQSPELQPWNPGHDQDHHVHI GQGKTLLLTSSATVYSIHISEGGKLVIKDHDEPIVLRTRHILIDNGGELHAGSALCPFQGN FTIILYGRADEGIQPDPYYGLKYIGVGKGGALELHGQKKLSWTFLNKTLHPGGMAEGG YFFERSWGHRGVIVHVIDPKSGTVIHSDRFDTYRSKKESERLVQYLNAVPDGRILSVAV NDEGSRNLDDMARKAMTKLGSKHFLHLGFRHPWSFLTVKGNPSSSVEDHIEYHGHRG SAAARVFKLFQTEHGEYFNVSLSSEWVQDVEWTEWFDHDKVSQTKGGEKISDLWKAH PGKICNRPIDIQATTMDGVNLSTEVVYKKGQDYRFACYDRGRACRSYRVRFLCGKPVR PKLTVTIDTNVNSTILNLEDNVQSWKPGDTLVIASTDYSMYQAEEFQVLPCRSCAPNQV KVAGKPMYLHIGEEIDGVDMRAEVGLLSRNIIVMGEMEDKCYPYRNHICNFFDFDTFG GHIKFALGFKAAHLEGTELKHMGQQLVGQYPIHFHLAGD of R30650_PEA_{—}2_P15 (SEQ ID NO:996).

[3139] Comparison report between R30650_PEA_{—}2_P15 (SEQ ID NO:996) and Q9H1K5 (SEQ ID NO:990):

[3140] 1. An isolated chimeric polypeptide encoding for R30650_PEA_{—}2_P15 (SEQ ID NO:996) comprising a first amino acid sequence being at least 70%, optionally at least 80%, preferably at least 85%, more preferably at least 90% and most preferably at least 95% homologous to a polypeptide having the sequence MGAAGRQDFLFKAMLTISWLTLTCFPGATSTVAAGCPDQSPELQPWNPGHDQDHHVHI GQGKTLLLTSSATVYSIHISEGGKLVIKDHDEPIVLRTRHILIDNGGELHAGSALCPFQGN FTIILYGRADEGIQPDPYYGLKYIGVGKGGALELHGQKKLSWTFLNKTLHPGGMAEGG YFFERSWGHRGVIVHVIDPKSGTVIHSDRFDTYRSKKESERLVQYLNAVPDGRILSVAV NDEGSRNLDDMARKAMTKLGSKHFLHLGFRHPWSFLTVKGNPSSSVEDHIEYHGHRG SAAARVFKLFQTEHGEYFNVSLSSEWVQDVEWTEWFDHDKVSQTKGGEKISDLWKAH PGKICNRPIDIQATTMDGVNLSTEVVYKKGQDYRFACYDRGRACRSYRVRFLCGKPVR PKLTVTIDTNVNSTILNLEDNVQSWKPGDTLVIASTDYSMYQAEEFQVLPCRSCAPNQV KVAGKPMYLHIGEEIDGVDMRAEVGLLSRNIIVMGEMEDKCYPYRNHICNFFDFDTFG GHIKFALGFKAAHLEGTELKHMGQQLVGQYPIHFHLAGDVDERGGYDPPTYIRDLSIHH TFSRCVTVHGSNGLLIKDVVGYNSLGHCFFTEDGPEERNTFDHCLGLLVKSGTLLPSDR DSKMCKMITEDSYPGYIPKPRQDCNAVSTFWMANPNNNLINCAAAGSEETGFWFIFHH VPTGPSVGMYSPGYSEHIPLGKFYNNRAHSNYRAGMIIDNGVKTTEASAKDKRPFLSIIS ARYSPHQDADPLKPREPAIIRHFIAYKNQDHGAWLRGGDVWLDSCRFADNGIGLTLAS GGTFPYDDGSKQEIKNSLFVGESGNVGTEMMDNRIWGPGGLDH corresponding to amino acids 1-862 of R30650_PEA_{—}2_P15 (SEQ ID NO:996), and a second amino acid sequence being at least 90% homologous to SGRTLPIGQNFPIRGIQLYDGPINIQNCTFRKFVALEGRHTSALAFRLNNAWQSCPHNNV TGIAFEDVPITSRVFFGEPGPWFNQLDMDGDKTSVFHDVDGSVSEYPGSYLTKNDNWL VRHPDCINVPDWRGAICSGCYAQMYIQAYKTSNLRMKIIKNDFPSHPLYLEGALTRSTH YQQYQPVVTLQKGYTIHWDQTAPAELAIWLINFNKGDWIRVGLCYPRGTTFSILSDVH NRLLKQTSKTGVFVRTLQMDKVEQSYPGRSHYYWDEDSG corresponding to amino acids 2-275 of Q9H1K5 (SEQ ID NO:990), which also corresponds to amino acids 863-1136 of R30650_PEA_{—}2_P15 (SEQ ID NO:996), wherein said first amino acid sequence and second amino acid sequence are contiguous and in a sequential order.

[3141] 2. An isolated polypeptide encoding for a head of R30650_PEA_{—}2_P15 (SEQ ID NO:996), comprising a polypeptide being at least 70%, optionally at least about 80%, preferably at least about 85%, more preferably at least about 90% and most preferably at least about 95% homologous to the sequence MGAAGRQDFLFKAMLTISWLTLTCFPGATSTVAAGCPDQSPELQPWNPGHDQDHHVHI GQGKTLLLTSSATVYSIHISEGGKLVIKDHDEPIVLRTRHILIDNGGELHAGSALCPFQGN FTIILYGRADEGIQPDPYYGLKYIGVGKGGALELHGQKKLSWTFLNKTLHPGGMAEGG YFFERSWGHRGVIVHVIDPKSGTVIHSDRFDTYRSKKESERLVQYLNAVPDGRILSVAV NDEGSRNLDDMARKAMTKLGSKHFLHLGFRHPWSFLTVKGNPSSSVEDHIEYHGHRG SAAARVFKLFQTEHGEYFNVSLSSEWVQDVEWTEWFDHDKVSQTKGGEKISDLWKAH PGKICNRPIDIQATTMDGVNLSTEVVYKKGQDYRFACYDRGRACRSYRVRFLCGKPVR PKLTVTIDTNVNSTILNLEDNVQSWKPGDTLVIASTDYSMYQAEEFQVLPCRSCAPNQV KVAGKPMYLHIGEEIDGVDMRAEVGLLSRNIIVMGEMEDKCYPYRNHICNFFDFDTFG GHIKFALGFKAAHLEGTELKHMGQQLVGQYPIHFHLAGDVDERGGYDPPTYIRDLSIHH TFSRCVTVHGSNGLLIKDVVGYNSLGHCFFTEDGPEERNTFDHCLGLLVKSGTLLPSDR DSKMCKMITEDSYPGYIPKPRQDCNAVSTFWMANPNNNLINCAAAGSEETGFWFIFHH VPTGPSVGMYSPGYSEHIPLGKFYNNRAHSNYRAGMIIDNGVKTTEASAKDKRPFLSIIS ARYSPHQDADPLKPREPAIIRHFIAYKNQDHGAWLRGGDVWLDSCRFADNGIGLTLAS GGTFPYDDGSKQEIKNSLFVGESGNVGTEMMDNRIWGPGGLDH of R30650_PEA_{—}2_P15 (SEQ ID NO:996).

[3142] The location of the variant protein was determined according to results from a number of different software programs and analyses, including analyses from SignalP and other specialized programs. The variant protein is believed to be located as follows with regard to the cell: secreted. The protein localization is believed to be secreted because both signal-peptide prediction programs predict that this protein has a signal peptide, and neither trans-membrane region prediction program predicts that this protein has a trans-membrane region.

[3143] Variant protein R30650_PEA_{—}2_P15 (SEQ ID NO:996) also has the following non-silent SNPs (Single Nucleotide Polymorphisms) as listed in Table 17, (given according to their position(s) on the amino acid sequence, with the alternative amino acid(s) listed; the last column indicates whether the SNP is known or not; the presence of known SNPs in variant protein R30650_PEA_{—}2_P15 (SEQ ID NO:996) sequence provides support for the deduced sequence of this variant protein according to the present invention).

[3144] Variant protein R30650_PEA_{—}2_P15 (SEQ ID NO:996) is encoded by the following transcript(s): R30650_PEA_{—}2_T18 (SEQ ID NO:934), for which the sequence(s) is/are given at the end of the application. The coding portion of transcript R30650_PEA_{—}2_T18 (SEQ ID NO:934) is shown in bold; this coding portion starts at position 265 and ends at position 3672. The transcript also has the following SNPs as listed in Table 18 (given according to their position on the nucleotide sequence, with the alternative nucleic acid listed; the last column indicates whether the SNP is known or not; the presence of known SNPs in variant protein R30650_PEA_{—}2_P15 (SEQ ID NO:996) sequence provides support for the deduced sequence of this variant protein according to the present invention).

[3145] Variant protein R30650_PEA_{—}2_P17 (SEQ ID NO:997) according to the present invention has an amino acid sequence as given at the end of the application; it is encoded by transcript(s) R30650_PEA_{—}2_T23 (SEQ ID NO:936). An alignment is given to the known protein (Protein KIAA1199 precursor (SEQ ID NO:986)) at the end of the application. One or more alignments to one or more previously published protein sequences are given at the end of the application. A brief description of the relationship of the variant protein according to the present invention to each such aligned protein is as follows:

[3146] Comparison report between R30650_PEA_{—}2_P17 (SEQ ID NO:997) and Q8WUJ3:

[3147] 1. An isolated chimeric polypeptide encoding for R30650_PEA_{—}2_P17 (SEQ ID NO:997) comprising a first amino acid sequence being at least 90% homologous to MGAAGRQDFLFKAMLTISWLTLTCFPGATSTVAAGCPDQSPELQPWNPGHDQDHHVHI GQGKTLLLTSSATVYSIHISEGGKLVIKDHDEPIVLRTRHILIDNGGELHAGSALCPFQGN FTIILYGRADEGIQPDPYYGLKYIGVGKGGALELHGQKKLSWTFLNKTLHPGGMAEGG YFFERSWGHRGVIVHVIDPKSGTVIHSDRFDTYRSKKESERLVQYLNAVPDGRILSVAV NDEGSRNLDDMARKAMTKLGSKHFLHLGFRHPWSFLTVKGNPSSSVEDHIEYHGHRG SAAARVFKLFQTEHGEYFNVSLSSEWVQ corresponding to amino acids 1-321 of Q8WUJ3 (SEQ ID NO:987), which also corresponds to amino acids 1-321 of R30650_PEA_{—}2_P17 (SEQ ID NO:997), and a second amino acid sequence being at least 70%, optionally at least 80%, preferably at least 85%, more preferably at least 90% and most preferably at least 95% homologous to a polypeptide having the sequence GEEFQTIW (SEQ ID NO:1473) corresponding to amino acids 322-329 of R30650_PEA_{—}2_P17 (SEQ ID NO:997), wherein said first amino acid sequence and second amino acid sequence are contiguous and in a sequential order.

[3148] 2. An isolated polypeptide encoding for a tail of R30650_PEA_{—}2_P17 (SEQ ID NO:997), comprising a polypeptide being at least 70%, optionally at least about 80%, preferably at least about 85%, more preferably at least about 90% and most preferably at least about 95% homologous to the sequence GEEFQTIW (SEQ ID NO:1473) in R30650_PEA_{—}2_P17 (SEQ ID NO:997).

[3149] The location of the variant protein was determined according to results from a number of different software programs and analyses, including analyses from SignalP and other specialized programs. The variant protein is believed to be located as follows with regard to the cell: secreted. The protein localization is believed to be secreted because both signal-peptide prediction programs predict that this protein has a signal peptide, and neither trans-membrane region prediction program predicts that this protein has a trans-membrane region.

[3150] Variant protein R30650_PEA_{—}2_P17 (SEQ ID NO:997) is encoded by the following transcript(s): R30650_PEA_{—}2_T23 (SEQ ID NO:936), for which the sequence(s) is/are given at the end of the application. The coding portion of transcript R30650_PEA_{—}2_T23 (SEQ ID NO:936) is shown in bold; this coding portion starts at position 265 and ends at position ¹²⁵I. The transcript also has the following SNPs as listed in Table 19 (given according to their position on the nucleotide sequence, with the alternative nucleic acid listed; the last column indicates whether the SNP is known or not; the presence of known SNPs in variant protein R30650_PEA_{—}2_P17 (SEQ ID NO:997) sequence provides support for the deduced sequence of this variant protein according to the present invention).

[3151] As noted above, cluster R30650 features 49 segment(s), which were listed in Table 2 above and for which the sequence(s) are given at the end of the application. These segment(s) are portions of nucleic acid sequence(s) which are described herein separately because they are of particular interest. A description of each segment according to the present invention is now provided.

[3152] Segment cluster R30650_PEA_{—}2_node_{—}0 (SEQ ID NO:937) according to the present invention is supported by 7 libraries. The number of libraries was determined as previously described. This segment can be found in the following transcript(s): R30650_PEA_{—}2_T6 (SEQ ID NO:931), R30650_PEA_{—}2_T14 (SEQ ID NO:932), R30650_PEA_{—}2_T15 (SEQ ID NO:933), R30650_PEA_{—}2_T18 (SEQ ID NO:934), R30650_PEA_{—}2_T21 (SEQ ID NO:935) and R30650_PEA_{—}2_T23 (SEQ ID NO:936). Table 20 below describes the starting and ending position of this segment on each transcript.

[3153] Segment cluster R30650_PEA_{—}2_node_{—}1 (SEQ ID NO:938) according to the present invention is supported by 5 libraries. The number of libraries was determined as previously described. This segment can be found in the following transcript(s): R30650_PEA_{—}2_T14 (SEQ ID NO:932), R30650_PEA_{—}2_T15 (SEQ ID NO:933) and R30650_PEA_{—}2_T21 (SEQ ID NO:935). Table 21 below describes the starting and ending position of this segment on each transcript.

[3154] Segment cluster R30650_PEA_{—}2_node_{—}3 (SEQ ID NO:939) according to the present invention is supported by 7 libraries. The number of libraries was determined as previously described. This segment can be found in the following transcript(s): R30650_PEA_{—}2_T14 (SEQ ID NO:932), R30650_PEA_{—}2_T15 (SEQ ID NO:933) and R30650_PEA_{—}2_T21 (SEQ ID NO:935). Table 22 below describes the starting and ending position of this segment on each transcript.

[3155] Segment cluster R30650_PEA_{—}2_node_{—}5 (SEQ ID NO:940) according to the present invention is supported by 8 libraries. The number of libraries was determined as previously described. This segment can be found in the following transcript(s): R30650_PEA_{—}2_T14 (SEQ ID NO:932), R30650_PEA_{—}2_T15 (SEQ ID NO:933) and R30650_PEA_{—}2_T21 (SEQ ID NO:935). Table 23 below describes the starting and ending position of this segment on each transcript.

[3156] Segment cluster R30650_PEA_{—}2_node_{—}9 (SEQ ID NO:941) according to the present invention is supported by 6 libraries. The number of libraries was determined as previously described. This segment can be found in the following transcript(s): R30650_PEA_{—}2_T21 (SEQ ID NO:935). Table 24 below describes the starting and ending position of this segment on each transcript.

[3157] Segment cluster R30650_PEA_{—}2_node_{—}11 (SEQ ID NO:942) according to the present invention is supported by 4 libraries. The number of libraries was determined as previously described. This segment can be found in the following transcript(s): R30650_PEA_{—}2_T14 (SEQ ID NO:932). Table 25 below describes the starting and ending position of this segment on each transcript.

[3158] Segment cluster R30650_PEA_{—}2_node_{—}14 (SEQ ID NO:943) according to the present invention is supported by 10 libraries. The number of libraries was determined as previously described. This segment can be found in the following transcript(s): R30650_PEA_{—}2_T14 (SEQ ID NO:932) and R30650_PEA_{—}2_T15 (SEQ ID NO:933). Table 26 below describes the starting and ending position of this segment on each transcript.

[3159] Segment cluster R30650_PEA_{—}2_node_{—}20 (SEQ ID NO:944) according to the present invention is supported by 6 libraries. The number of libraries was determined as previously described. This segment can be found in the following transcript(s): R30650_PEA_{—}2_T6 (SEQ ID NO:931) R30650_PEA_{—}2_T18 (SEQ ID NO:934) and R30650_PEA_{—}2_T23 (SEQ ID NO:936). Table 27 below describes the starting and ending position of this segment on each transcript.

[3160] Segment cluster R30650_PEA_{—}2_node_{—}22 (SEQ ID NO:945) according to the present invention is supported by 6 libraries. The number of libraries was determined as previously described. This segment can be found in the following transcript(s): R30650_PEA_{—}2_T6 (SEQ ID NO:931), R30650_PEA_{—}2_T18 (SEQ ID NO:934) and R30650_PEA_{—}2_T23 (SEQ ID NO:936). Table 28 below describes the starting and ending position of this segment on each transcript.

[3161] Segment cluster R30650_PEA_{—}2_node_{—}24 (SEQ ID NO:946) according to the present invention is supported by 7 libraries. The number of libraries was determined as previously described. This segment can be found in the following transcript(s): R30650_PEA_{—}2_T6 (SEQ ID NO:931), R30650_PEA_{—}2_T18 (SEQ ID NO:934) and R30650_PEA_{—}2_T23 (SEQ ID NO:936). Table 29 below describes the starting and ending position of this segment on each transcript.

[3162] Segment cluster R30650_PEA_{—}2_node_{—}26 (SEQ ID NO:947) according to the present invention is supported by 7 libraries. The number of libraries was determined as previously described. This segment can be found in the following transcript(s): R30650_PEA_{—}2_T6 (SEQ ID NO:931), R30650_PEA_{—}2_T18 (SEQ ID NO:934) and R30650_PEA_{—}2_T23 (SEQ ID NO:936). Table 30 below describes the starting and ending position of this segment on each transcript.

[3163] Segment cluster R30650_PEA_{—}2_node_{—}32 (SEQ ID NO:948) according to the present invention is supported by 4 libraries. The number of libraries was determined as previously described. This segment can be found in the following transcript(s): R30650_PEA_{—}2_T23 (SEQ ID NO:936). Table 31 below describes the starting and ending position of this segment on each transcript.

[3164] Segment cluster R30650_PEA_{—}2_node_{—}34 (SEQ ID NO:949) according to the present invention is supported by 8 libraries. The number of libraries was determined as previously described. This segment can be found in the following transcript(s): R30650_PEA_{—}2_T6 (SEQ ID NO:931) and R30650_PEA_{—}2_T18 (SEQ ID NO:934). Table 32 below describes the starting and ending position of this segment on each transcript.

[3165] Segment cluster R30650_PEA_{—}2_node_{—}36 (SEQ ID NO:950) according to the present invention is supported by 3 libraries. The number of libraries was determined as previously described. This segment can be found in the following transcript(s): R30650_PEA_{—}2_T3 (SEQ ID NO:930). Table 33 below describes the starting and ending position of this segment on each transcript.

[3166] Segment cluster R30650_PEA_{—}2_node_{—}37 (SEQ ID NO:951) according to the present invention is supported by 8 libraries. The number of libraries was determined as previously described. This segment can be found in the following transcript(s): R30650_PEA_{—}2_T3 (SEQ ID NO:930), R30650_PEA_{—}2_T6 (SEQ ID NO:931) and R30650_PEA_{—}2_T18 (SEQ ID NO:934). Table 34 below describes the starting and ending position of this segment on each transcript.

[3167] Segment cluster R30650_PEA_{—}2_node_{—}39 (SEQ ID NO:952) according to the present invention is supported by 8 libraries. The number of libraries was determined as previously described. This segment can be found in the following transcript(s): R30650_PEA_{—}2_T3 (SEQ ID NO:930), R30650_PEA_{—}2_T6 (SEQ ID NO:931) and R30650_PEA_{—}2_T18 (SEQ ID NO:934). Table 35 below describes the starting and ending position of this segment on each transcript.

[3168] Segment cluster R30650_PEA_{—}2_node_{—}41 (SEQ ID NO:953) according to the present invention is supported by 3 libraries. The number of libraries was determined as previously described. This segment can be found in the following transcript(s): R30650_PEA_{—}2_T2 (SEQ ID NO:929). Table 36 below describes the starting and ending position of this segment on each transcript.

[3169] Segment cluster R30650_PEA_{—}2_node_{—}42 (SEQ ID NO:954) according to the present invention is supported by 8 libraries. The number of libraries was determined as previously described. This segment can be found in the following transcript(s): R30650_PEA_{—}2_T2 (SEQ ID NO:929), R30650_PEA_{—}2_T3 (SEQ ID NO:930), R30650_PEA_{—}2_T6 (SEQ ID NO:931) and R30650_PEA_{—}2_T18 (SEQ ID NO:934). Table 37 below describes the starting and ending position of this segment on each transcript.

[3170] Segment cluster R30650_PEA_{—}2_node_{—}44 (SEQ ID NO:955) according to the present invention is supported by 8 libraries. The number of libraries was determined as previously described. This segment can be found in the following transcript(s): R30650_PEA_{—}2_T2 (SEQ ID NO:929), R30650_PEA_{—}2_T3 (SEQ ID NO:930), R30650_PEA_{—}2_T6 (SEQ ID NO:931) and R30650_PEA_{—}2_T18 (SEQ ID NO:934). Table 38 below describes the starting and ending position of this segment on each transcript.

[3171] Segment cluster R30650_PEA_{—}2_node_{—}46 (SEQ ID NO:956) according to the present invention is supported by 9 libraries. The number of libraries was determined as previously described. This segment can be found in the following transcript(s): R30650_PEA_{—}2_T2 (SEQ ID NO:929), R30650_PEA_{—}2_T3 (SEQ ID NO:930), R30650_PEA_{—}2_T6 (SEQ ID NO:931) and R30650_PEA_{—}2_T18 (SEQ ID NO:934). Table 39 below describes the starting and ending position of this segment on each transcript.

[3172] Segment cluster R30650_PEA_{—}2_node_{—}50 (SEQ ID NO:957) according to the present invention is supported by 9 libraries. The number of libraries was determined as previously described. This segment can be found in the following transcript(s): R30650_PEA_{—}2_T2 (SEQ ID NO:929), R30650_PEA_{—}2_T3 (SEQ ID NO:930), R30650_PEA_{—}2_T6 (SEQ ID NO:931) and R30650_PEA_{—}2_T18 (SEQ ID NO:934). Table 40 below describes the starting and ending position of this segment on each transcript.

[3173] Segment cluster R30650_PEA_{—}2_node_{—}56 (SEQ ID NO:958) according to the present invention is supported by 10 libraries. The number of libraries was determined as previously described. This segment can be found in the following transcript(s): R30650_PEA_{—}2_T2 (SEQ ID NO:929), R30650_PEA_{—}2_T3 (SEQ ID NO:930), R30650_PEA_{—}2_T6 (SEQ ID NO:931) and R30650_PEA_{—}2_T18 (SEQ ID NO:934). Table 41 below describes the starting and ending position of this segment on each transcript.

[3174] Segment cluster R30650_PEA_{—}2_node_{—}60 (SEQ ID NO:959) according to the present invention is supported by 12 libraries. The number of libraries was determined as previously described. This segment can be found in the following transcript(s): R30650_PEA_{—}2_T2 (SEQ ID NO:929), R30650_PEA_{—}2_T3 (SEQ ID NO:930), R30650_PEA_{—}2_T6 (SEQ ID NO:931) and R30650_PEA_{—}2_T18 (SEQ ID NO:934). Table 42 below describes the starting and ending position of this segment on each transcript.

[3175] Segment cluster R30650_PEA_{—}2_node_{—}63 (SEQ ID NO:960) according to the present invention is supported by 12 libraries. The number of libraries was determined as previously described. This segment can be found in the following transcript(s): R30650_PEA_{—}2_T2 (SEQ ID NO:929), R30650_PEA_{—}2_T3 (SEQ ID NO:930), R30650_PEA_{—}2_T6 (SEQ ID NO:931) and R30650_PEA_{—}2_T18 (SEQ ID NO:934). Table 43 below describes the starting and ending position of this segment on each transcript.

[3176] Segment cluster R30650_PEA_{—}2_node_{—}67 (SEQ ID NO:961) according to the present invention is supported by 11 libraries. The number of libraries was determined as previously described. This segment can be found in the following transcript(s): R30650_PEA_{—}2_T2 (SEQ ID NO:929), R30650_PEA_{—}2_T3 (SEQ ID NO:930), R30650_PEA_{—}2_T6 (SEQ ID NO:931) and R30650_PEA_{—}2_T18 (SEQ ID NO:934). Table 44 below describes the starting and ending position of this segment on each transcript.

[3177] Segment cluster R30650_PEA_{—}2_node_{—}70 (SEQ ID NO:962) according to the present invention is supported by 11 libraries. The number of libraries was determined as previously described. This segment can be found in the following transcript(s): R30650_PEA_{—}2_T2 (SEQ ID NO:929, R30650_PEA_{—}2_T3 (SEQ ID NO:930), R30650_PEA_{—}2_T6 (SEQ ID NO:931) and R30650_PEA_{—}2_T18 (SEQ ID NO:934). Table 45 below describes the starting and ending position of this segment on each transcript.

[3178] Segment cluster R30650_PEA_{—}2_node_{—}72 (SEQ ID NO:963) according to the present invention is supported by 14 libraries. The number of libraries was determined as previously described. This segment can be found in the following transcript(s): R30650_PEA_{—}2_T2 (SEQ ID NO:929), R30650_PEA_{—}2_T3 (SEQ ID NO:930), R30650_PEA_{—}2_T6 (SEQ ID NO:931) and R30650_PEA_{—}2_T18 (SEQ ID NO:934). Table 46 below describes the starting and ending position of this segment on each transcript.

[3179] Segment cluster R30650_PEA_{—}2_node_{—}73 (SEQ ID NO:964) according to the present invention is supported by 3 libraries. The number of libraries was determined as previously described. This segment can be found in the following transcript(s): R30650_PEA_{—}2_T18 (SEQ ID NO:934). Table 47 below describes the starting and ending position of this segment on each transcript.

[3180] Segment cluster R30650_PEA_{—}2_node_{—}75 (SEQ ID NO:965) according to the present invention is supported by 14 libraries. The number of libraries was determined as previously described. This segment can be found in the following transcript(s): R30650_PEA_{—}2_T2 (SEQ ID NO:929) and R30650_PEA_{—}2_T3 (SEQ ID NO:930). Table 48 below describes the starting and ending position of this segment on each transcript.

[3181] Segment cluster R30650_PEA_{—}2_node_{—}79 (SEQ ID NO:966) according to the present invention is supported by 15 libraries. The number of libraries was determined as previously described. This segment can be found in the following transcript(s): R30650_PEA_{—}2_T2 (SEQ ID NO:929), R30650_PEA_{—}2_T3 (SEQ ID NO:930) and R30650_PEA_{—}2_T6 (SEQ ID NO:931). Table 49 below describes the starting and ending position of this segment on each transcript.

[3182] Segment cluster R30650_PEA_{—}2_node_{—}86 (SEQ ID NO:967) according to the present invention is supported by 43 libraries. The number of libraries was determined as previously described. This segment can be found in the following transcript(s): R30650_PEA_{—}2_T2 (SEQ ID NO:929), R30650_PEA_{—}2_T3 (SEQ ID NO:930) and R30650_PEA_{—}2_T6 (SEQ ID NO:931). Table 50 below describes the starting and ending position of this segment on each transcript.

[3183] Segment cluster R30650_PEA_{—}2_node_{—}87 (SEQ ID NO:968) according to the present invention is supported by 43 libraries. The number of libraries was determined as previously described. This segment can be found in the following transcript(s): R30650_PEA_{—}2_T2 (SEQ ID NO:929), R30650_PEA_{—}2_T3 (SEQ ID NO:930) and R30650_PEA_{—}2_T6 (SEQ ID NO:931). Table 51 below describes the starting and ending position of this segment on each transcript.

[3184] Segment cluster R30650_PEA_{—}2_node_{—}89 (SEQ ID NO:969) according to the present invention is supported by 69 libraries. The number of libraries was determined as previously described. This segment can be found in the following transcript(s): R30650_PEA_{—}2_T2 (SEQ ID NO:929), R30650_PEA_{—}2_T3 (SEQ ID NO:930) and R30650_PEA_{—}2_T6 (SEQ ID NO:931). Table 52 below describes the starting and ending position of this segment on each transcript.

[3185] Segment cluster R30650_PEA_{—}2_node_{—}93 (SEQ ID NO:970) according to the present invention is supported by 108 libraries. The number of libraries was determined as previously described. This segment can be found in the following transcript(s): R30650_PEA_{—}2_T2 (SEQ ID NO:929), R30650_PEA_{—}2_T3 (SEQ ID NO:930) and R30650_PEA_{—}2_T6 (SEQ ID NO:931). Table 53 below describes the starting and ending position of this segment on each transcript.

[3186] According to an optional embodiment of the present invention, short segments related to the above cluster are also provided. These segments are up to about 120 bp in length, and so are included in a separate description.

[3187] Segment cluster R30650_PEA_{—}2_node_{—}8 (SEQ ID NO:971) according to the present invention is supported by 10 libraries. The number of libraries was determined as previously described. This segment can be found in the following transcript(s): R30650_PEA_{—}2_T14 (SEQ ID NO:932), R30650_PEA_{—}2_T15 (SEQ ID NO:933) and R30650_PEA_{—}2_T21 (SEQ ID NO:935). Table 54 below describes the starting and ending position of this segment on each transcript.

[3188] Segment cluster R30650_PEA_{—}2_node_{—}17 (SEQ ID NO:972) according to the present invention is supported by 6 libraries. The number of libraries was determined as previously described. This segment can be found in the following transcript(s): R30650_PEA_{—}2_T6 (SEQ ID NO:931), R30650_PEA_{—}2_T18 (SEQ ID NO:934) and R30650_PEA_{—}2_T23 (SEQ ID NO:936). Table 55 below describes the starting and ending position of this segment on each transcript.

[3189] Segment cluster R30650_PEA_{—}2_node_{—}28 (SEQ ID NO:973) according to the present invention is supported by 7 libraries. The number of libraries was determined as previously described. This segment can be found in the following transcript(s): R30650_PEA_{—}2_T6 (SEQ ID NO:931), R30650_PEA_{—}2_T18 (SEQ ID NO:934) and R30650_PEA_{—}2_T23 (SEQ ID NO:936). Table 56 below describes the starting and ending position of this segment on each transcript.

[3190] Segment cluster R30650_PEA_{—}2_node_{—}31 (SEQ ID NO:974) according to the present invention is supported by 8 libraries. The number of libraries was determined as previously described. This segment can be found in the following transcript(s): R30650_PEA_{—}2_T6 (SEQ ID NO:931), R30650_PEA_{—}2_T18 (SEQ ID NO:934) and R30650_PEA_{—}2_T23 (SEQ ID NO:936). Table 57 below describes the starting and ending position of this segment on each transcript.

[3191] Segment cluster R30650_PEA_{—}2_node_{—}48 (SEQ ID NO:975) according to the present invention is supported by 10 libraries. The number of libraries was determined as previously described. This segment can be found in the following transcript(s): R30650_PEA_{—}2_T2 (SEQ ID NO:929), R30650_PEA_{—}2_T3 (SEQ ID NO:930), R30650_PEA_{—}2_T6 (SEQ ID NO:931) and R30650_PEA_{—}2_T18 (SEQ ID NO:934). Table 58 below describes the starting and ending position of this segment on each transcript.

[3192] Segment cluster R30650_PEA_{—}2_node_{—}53 (SEQ ID NO:976) according to the present invention is supported by 12 libraries. The number of libraries was determined as previously described. This segment can be found in the following transcript(s): R30650_PEA_{—}2_T2 (SEQ ID NO:929), R30650_PEA_{—}2_T3 (SEQ ID NO:930), R30650_PEA_{—}2_T6 (SEQ ID NO:931) and R30650_PEA_{—}2_T18 (SEQ ID NO:934). Table 59 below describes the starting and ending position of this segment on each transcript.

[3193] Segment cluster R30650_PEA_{—}2_node_{—}58 (SEQ ID NO:977) according to the present invention is supported by 10 libraries. The number of libraries was determined as previously described. This segment can be found in the following transcript(s): R30650_PEA_{—}2_T2 (SEQ ID NO:929), R30650_PEA_{—}2_T3 (SEQ ID NO:930), R30650_PEA_{—}2_T6 (SEQ ID NO:931) and R30650_PEA_{—}2_T18 (SEQ ID NO:934). Table 60 below describes the starting and ending position of this segment on each transcript.

[3194] Segment cluster R30650_PEA_{—}2_node_{—}68 (SEQ ID NO:978) according to the present invention is supported by 10 libraries. The number of libraries was determined as previously described. This segment can be found in the following transcript(s): R30650_PEA_{—}2_T2 (SEQ ID NO:929), R30650_PEA_{—}2_T3 (SEQ ID NO:930), R30650_PEA_{—}2_T6 (SEQ ID NO:931) and R30650_PEA_{—}2_T18 (SEQ ID NO:934). Table 61 below describes the starting and ending position of this segment on each transcript.

[3195] Segment cluster R30650_PEA_{—}2_node_{—}77 (SEQ ID NO:979) according to the present invention is supported by 13 libraries. The number of libraries was determined as previously described. This segment can be found in the following transcript(s): R30650_PEA_{—}2_T2 (SEQ ID NO:929), R30650_PEA_{—}2_T3 (SEQ ID NO:930) and R30650_PEA_{—}2_T6 (SEQ ID NO:931). Table 62 below describes the starting and ending position of this segment on each transcript.

[3196] Segment cluster R30650_PEA_{—}2_node_{—}82 (SEQ ID NO:980) according to the present invention is supported by 20 libraries. The number of libraries was determined as previously described. This segment can be found in the following transcript(s): R30650_PEA_{—}2_T2 (SEQ ID NO:929), R30650_PEA_{—}2_T3 (SEQ ID NO:930) and R30650_PEA_{—}2_T6 (SEQ ID NO:931). Table 63 below describes the starting and ending position of this segment on each transcript.

[3197] Segment cluster R30650_PEA_{—}2_node_{—}85 (SEQ ID NO:981) according to the present invention can be found in the following transcript(s): R30650_PEA_{—}2_T2 (SEQ ID NO:929), R30650_PEA_{—}2_T3 (SEQ ID NO:930) and R30650_PEA_{—}2_T6 (SEQ ID NO:931). Table 64 below describes the starting and ending position of this segment on each transcript.

[3198] Segment cluster R30650_PEA_{—}2_node_{—}88 (SEQ ID NO:982) according to the present invention is supported by 38 libraries. The number of libraries was determined as previously described. This segment can be found in the following transcript(s): R30650_PEA_{—}2_T2 (SEQ ID NO:929), R30650_PEA_{—}2_T3 (SEQ ID NO:930) and R30650_PEA_{—}2_T6 (SEQ ID NO:931). Table 65 below describes the starting and ending position of this segment on each transcript.

[3199] Segment cluster R30650_PEA_{—}2_node_{—}90 (SEQ ID NO:983) according to the present invention can be found in the following transcript(s): R30650_PEA_{—}2_T2 (SEQ ID NO:929), R30650_PEA_{—}2_T3 (SEQ ID NO:930) and R30650_PEA_{—}2_T6 (SEQ ID NO:931). Table 66 below describes the starting and ending position of this segment on each transcript.

[3200] Segment cluster R30650_PEA_{—}2_node_{—}91 (SEQ ID NO:984) according to the present invention is supported by 45 libraries. The number of libraries was determined as previously described. This segment can be found in the following transcript(s): R30650_PEA_{—}2_T2 (SEQ ID NO:929), R30650_PEA_{—}2_T3 (SEQ ID NO:930) and R30650_PEA_{—}2_T6 (SEQ ID NO:931). Table 67 below describes the starting and ending position of this segment on each transcript.

[3201] Segment cluster R30650_PEA_{—}2_node_{—}92 (SEQ ID NO:985) according to the present invention can be found in the following transcript(s): R30650_PEA_{—}2_T2 (SEQ ID NO:929), R30650_PEA_{—}2_T3 (SEQ ID NO:930) and R30650_PEA_{—}2_T6 (SEQ ID NO:931). Table 68 below describes the starting and ending position of this segment on each transcript.

Variant protein alignment to the previously known protein:

Sequence name: Q9ULM1 (SEQ ID NO:989)

Sequence Documentation:

Alignment of: R30650_PEA_{—}2_P4 (SEQ ID NO:991)×Q9ULM1 (SEQ ID NO:989) ••

Alignment segment 1/1:

Alignment:

Sequence name: Q8WUJ3 (SEQ ID NO:987)

Sequence Documentation:

Alignment of: R30650_PEA_{—}2_P4 (SEQ ID NO:991)×Q8WUJ3 (SEQ ID NO:987) ••

Alignment segment 1/1:

Alignment:

Sequence name: Q9NPN9 (SEQ ID NO:988)

Sequence Documentation:

Alignment of: R30650_PEA_{—}2_P4 (SEQ ID NO:991)×Q9NPN9 (SEQ ID NO:988) ••

Alignment segment 1/1:

Alignment:

Sequence name: Q9H1K5 (SEQ ID NO:990)

Sequence Documentation:

Alignment of: R30650_PEA_{—}2_P4 (SEQ ID NO:991)×Q9H1K5 (SEQ ID NO:990) ••

Alignment segment 1/1:

Alignment:

Sequence name: Q9ULM1 (SEQ ID NO:989)

Sequence Documentation:

Alignment of: R30650_PEA_{—}2_P5 (SEQ ID NO:992)×Q9ULM1 (SEQ ID NO:989) ••

Alignment segment 1/1:

Alignment:

Sequence name: Q8WUJ3 (SEQ ID NO:987)

Sequence Documentation:

Alignment of: R30650_PEA_{—}2_P5 (SEQ ID NO:992)×Q8WUJ3 (SEQ ID NO:987) ••

Alignment segment 1/1:

Alignment:

Sequence name: Q9NPN9 (SEQ ID NO:988)

Sequence Documentation:

Alignment of: R30650_PEA_{—}2_P5 (SEQ ID NO:992)×Q9NPN9 (SEQ ID NO:988) ••

Alignment segment 1/1:

Alignment:

Sequence name: Q9H1K5 (SEQ ID NO:990)

Sequence Documentation:

Alignment of: R30650_PEA_{—}2_P5 (SEQ ID NO:992)×Q9H1K5 (SEQ ID NO:990) ••

Alignment segment 1/1:

Alignment:

Sequence name: Q9ULM1 (SEQ ID NO:989)

Sequence Documentation:

Alignment of: R30650_PEA_{—}2_P8 (SEQ ID NO:993)×Q9ULM1 (SEQ ID NO:989) ••

Alignment segment 1/1:

Alignment:

Sequence name: Q8WUJ3 (SEQ ID NO:987)

Sequence Documentation:

Alignment of: R30650_PEA_{—}2_P8 (SEQ ID NO:993)×Q8WUJ3 (SEQ ID NO:987) ••

Alignment segment 1/1:

Alignment:

Sequence name: Q9NPN9 (SEQ ID NO:988)

Sequence Documentation:

Alignment of: R30650_PEA_{—}2_P8 (SEQ ID NO:993)×Q9NPN9 (SEQ ID NO:988) ••

Alignment segment 1/1:

Alignment:

Sequence name: Q9H1K5 (SEQ ID NO:990)

Sequence Documentation:

Alignment of: R30650_PEA_{—}2_P8 (SEQ ID NO:993)×Q9H1K5 (SEQ ID NO:990) ••

Alignment segment 1/1:

Alignment:

Sequence name: Q9ULM1 (SEQ ID NO:989)

Sequence Documentation:

Alignment of: R30650_PEA_{—}2_P15 (SEQ ID NO:996)×Q9ULM1 (SEQ ID NO:989) ••

Alignment segment 1/1:

Alignment:

Sequence name: Q8WUJ3 (SEQ ID NO:987)

Sequence Documentation:

Alignment of: R30650_PEA_{—}2_P15 (SEQ ID NO:996)×Q8WUJ3 (SEQ ID NO:987) ••

Alignment segment 1/1:

Alignment:

Sequence name: Q9NPN9 (SEQ ID NO:988)

Sequence Documentation:

Alignment of: R30650_PEA_{—}2_P15 (SEQ ID NO:996)×Q9NPN9 (SEQ ID NO:988) ••

Alignment segment 1/1:

Alignment:

Sequence name: Q9H1K5 (SEQ ID NO:990)

Sequence Documentation:

Alignment of: R30650_PEA_{—}2_P15 (SEQ ID NO:996)×Q9H1K5 (SEQ ID NO:990) ••

Alignment segment 1/1:

Alignment:

Sequence name: Q8WUJ3 (SEQ ID NO:987)

Sequence Documentation:

Alignment of: R30650_PEA_{—}2_P17 (SEQ ID NO:997)×Q8WUJ3 (SEQ ID NO:987) ••

Alignment segment 1/1:

Alignment:

[3202] Expression of R30650 transcripts which are detectable by amplicon as depicted in sequence name R30650 seg76 (SEQ ID NO:1354) in normal and cancerous colon tissues

[3203] Expression of R30650 transcripts detectable by or according to seg76, R30650 amplicon (SEQ ID NO:1354) and R30650 F (SEQ ID NO:1352) and R30650 R (SEQ ID NO:1353) primers was measured by real time PCR. In parallel the expression of four housekeeping genes—PBGD (GenBank Accession No. BC019323 (SEQ ID NO:1576); amplicon—PBGD-amplicon, SEQ ID NO:531), HPRT1 (GenBank Accession No. NM_{—}000194 (SEQ ID NO:1577); amplicon—HPRT1-amplicon, SEQ ID NO:612), G6PD (GenBank Accession No. NM_{—}000402 (SEQ ID NO:1578); G6PD amplicon, SEQ ID NO:615), RPS27A (GenBank Accession No. NM_{—}002954 (SEQ ID NO:1579); RPS27A amplicon, SEQ ID NO:1261), was measured similarly. For each RT sample, the expression of the above amplicon was normalized to the geometric mean of the quantities of the housekeeping genes. The normalized quantity of each RT sample was then divided by the median of the quantities of the normal post-mortem (PM) samples (Sample Nos. 41, 52, 62-67, 69-71, Table 1, above, “Tissue samples in testing panel”), to obtain a value of fold up-regulation for each sample relative to median of the normal PM samples.

[3204] FIG. 57 is a histogram showing over expression of the above-indicated R30650 transcripts in cancerous colon samples relative to the normal samples. The number and percentage of samples that exhibit at least 5 fold over-expression, out of the total number of samples tested is indicated in the bottom.

[3205] As is evident from FIG. 57, the expression of R30650 transcripts detectable by the above amplicon in cancer samples was significantly higher than in the non-cancerous samples (Sample Nos. 41, 52, 62-67, 69-71, Table 1, “Tissue samples in testing panel”). Notably an over-expression of at least 5 fold was found in 18 out of 37 adenocarcinoma samples,

[3206] Statistical analysis was applied to verify the significance of these results, as described below.

[3207] The P value for the difference in the expression levels of R30650 transcripts detectable by the above amplicon in colon cancer samples versus the normal tissue samples was determined by T test as 1.86E-05.

[3208] Threshold of 5 fold overexpression was found to differentiate between cancer and normal samples with P value of 2.42E-03 as checked by exact fisher test. The above values demonstrate statistical significance of the results.

[3209] Primer pairs are also optionally and preferably encompassed within the present invention; for example, for the above experiment, the following primer pair was used as a non-limiting illustrative example only of a suitable primer pair: R30650 Fforward primer (SEQ ID NO:1352); and R30650 Rreverse primer (SEQ ID NO:1353).

[3210] The present invention also preferably encompasses any amplicon obtained through the use of any suitable primer pair; for example, for the above experiment, the following amplicon was obtained as a non-limiting illustrative example only of a suitable amplicon: R30650 (SEQ ID NO:1354).

Description for Cluster T23657

[3211] Cluster T23657 features 31 transcript(s) and 33 segment(s) of interest, the names for which are given in Tables 1 and 2, respectively, the sequences themselves are given at the end of the application. The selected protein variants are given in table 3.

[3212] These sequences are variants of the known protein Solute carrier family 21 member 12 (SwissProt accession identifier S21C_HUMAN; known also according to the synonyms Sodium-independent organic anion transporter E; Organic anion transporting polypeptide E; OATP-E; Colon organic anion transporter; Organic anion transporter polypeptide-related protein 1; OATP-RP1; OATPRP1; POAT), SEQ ID NO:1062, referred to herein as the previously known protein.

[3213] Protein Solute carrier family 21 member 12 (SEQ ID NO:1062) is known or believed to have the following function(s): Mediates the Na(+)-independent transport of organic anions such as the thyroid hormones T3 (triiodo-L-thyronine), T4 (thyroxine) and rT3, and of estrone-3-sulfate and taurocholate. The sequence for protein Solute carrier family 21 member 12 is given at the end of the application, as “Solute carrier family 21 member 12 amino acid sequence”. Known polymorphisms for this sequence are as shown in Table 4.

[3214] Protein Solute carrier family 21 member 12 (SEQ ID NO:1062) localization is believed to be Integral membrane protein.

[3215] The following GO Annotation(s) apply to the previously known protein. The following annotation(s) were found: ion transport, which are annotation(s) related to Biological Process; transporter, which are annotation(s) related to Molecular Function; and integral membrane protein, which are annotation(s) related to Cellular Component.

[3216] The GO assignment relies on information from one or more of the SwissProt/TremB1 Protein knowledgebase, available from <http://www.expasy.ch/sprot/>; or Locuslink, available from <http://www.ncbi.nlm.nih.gov/projects/LocusLink/>.

[3217] Cluster T23657 can be used as a diagnostic marker according to overexpression of transcripts of this cluster in cancer. Expression of such transcripts in normal tissues is also given according to the previously described methods. The term “number” in the left hand column of the table and the numbers on the y-axis of the figure below refer to weighted expression of ESTs in each category, as “parts per million” (ratio of the expression of ESTs for a particular cluster to the expression of all ESTs in that category, according to parts per million).

[3218] Overall, the following results were obtained as shown with regard to the histograms in FIG. 58 and Table 5. This cluster is overexpressed (at least at a minimum level) in the following pathological conditions: epithelial malignant tumors.

[3219] As noted above, cluster T23657 features 31 transcript(s), which were listed in Table 1 above. These transcript(s) encode for protein(s) which are variant(s) of protein Solute carrier family 21 member 12 (SEQ ID NO:1062). A description of each variant protein according to the present invention is now provided.

[3220] Variant protein T23657_P1 (SEQ ID NO:1063) according to the present invention has an amino acid sequence as given at the end of the application; it is encoded by transcript(s) T23657_T0 (SEQ ID NO:998), T23657_T1 (SEQ ID NO:999) and T23657_T8 (SEQ ID NO:1006). The location of the variant protein was determined according to results from a number of different software programs and analyses, including analyses from SignalP and other specialized programs. The variant protein is believed to be located as follows with regard to the cell: membrane. The protein localization is believed to be membrane because both trans-membrane region prediction programs predicted a trans-membrane region for this protein.

[3221] Variant protein T23657_P1 (SEQ ID NO:1063) also has the following non-silent SNPs (Single Nucleotide Polymorphisms) as listed in Table 7, (given according to their position(s) on the amino acid sequence, with the alternative amino acid(s) listed; the last column indicates whether the SNP is known or not; the presence of known SNPs in variant protein T23657_P1 (SEQ ID NO:1063) sequence provides support for the deduced sequence of this variant protein according to the present invention).

[3222] Variant protein T23657_P1 (SEQ ID NO:1063) is encoded by the following transcript(s): T23657_T0 (SEQ ID NO:998), T23657_T1 (SEQ ID NO:999) and T23657_T8 (SEQ ID NO:1006), for which the sequence(s) is/are given at the end of the application.

[3223] The coding portion of transcript T23657_T0 (SEQ ID NO:998) is shown in bold; this coding portion starts at position 212 and ends at position 2377. The transcript also has the following SNPs as listed in Table 8 (given according to their position on the nucleotide sequence, with the alternative nucleic acid listed; the last column indicates whether the SNP is known or not; the presence of known SNPs in variant protein T23657_P1 (SEQ ID NO:1063) sequence provides support for the deduced sequence of this variant protein according to the present invention).

[3224] The coding portion of transcript T23657_T1 (SEQ ID NO:999) is shown in bold; this coding portion starts at position 212 and ends at position 2377. The transcript also has the following SNPs as listed in Table 9 (given according to their position on the nucleotide sequence, with the alternative nucleic acid listed; the last column indicates whether the SNP is known or not; the presence of known SNPs in variant protein T23657_P1 (SEQ ID NO:1063) sequence provides support for the deduced sequence of this variant protein according to the present invention).

[3225] The coding portion of transcript T23657_T8 (SEQ ID NO:1006) is shown in bold; this coding portion starts at position 212 and ends at position 2377. The transcript also has the following SNPs as listed in Table 10 (given according to their position on the nucleotide sequence, with the alternative nucleic acid listed; the last column indicates whether the SNP is known or not; the presence of known SNPs in variant protein T23657_P1 (SEQ ID NO:1063) sequence provides support for the deduced sequence of this variant protein according to the present invention).

[3226] Variant protein T23657_P2 (SEQ ID NO:1064) according to the present invention has an amino acid sequence as given at the end of the application; it is encoded by transcript(s) T23657_T2 (SEQ ID NO:1000), T23657_T7 (SEQ ID NO:1005), T23657_T16 (SEQ ID NO:1014) and T23657_T20 (SEQ ID NO:1017). An alignment is given to the known protein (Solute carrier family 21 member 12 (SEQ ID NO:1062)) at the end of the application. One or more alignments to one or more previously published protein sequences are given at the end of the application. A brief description of the relationship of the variant protein according to the present invention to each such aligned protein is as follows:

[3227] Comparison report between T23657_P2 (SEQ ID NO:1064) and S21C_HUMAN (SEQ ID NO:1062):

[3228] 1. An isolated chimeric polypeptide encoding for T23657_P2 (SEQ ID NO:1064), comprising a first amino acid sequence being at least 90% homologous to MPLHQLGDKPLTFPSPNSAMENGLDHTPPSRRASPGTPLSPGSLRSAAHSPLDTSKQPLC QLWAEKHGARGTHEVRYVSAGQSVACGWWAFAPPCLQVLNTPKGILFFLCAAAFLQG MTVNGFINTVITSLERRYDLHSYQSGLIASSYDIAACLCLTFVSYFGGSGHKPRWLGWG VLLMGTGSLVFALPHFTAGRYEVELDAGVRTCPANPGAVCADSTSGLSRYQLVFMLG QFLHGVGATPLYTLGVTYLDENVKSSCSPVYIAIFYTAAILGPAAGYLIGGALLNIYTEM GRRTELTTESPLWVGAWWVGFLGSGAAAFFTAVPILGYPRQLPGSQRYAVMRAAEMH QLKDSSRGEASNPDFGKTIRDLPLSIWLLLKNPTFILLCLAGATEATLITGMSTFSPKFLES QFSLSASEAATLFGYLVVPAGGGGTFLGGFFVNKLRLRGSAVIKFCLFCTVVSLLGILVF SLHCPSVPMAGVTASYGGSLLPEGHLNLTAPCNAACSCQPEHYSPVCGSDGLMYFSLC HAGCPAATETNVDGQKVYRDCSCIPQNLSSGFGHATAGKCTSTCQRKPLLLVFIFVVIFF TFLSSIPALTATLRCVRDPQRSFALGIQWIVVRILGGIPGPIAFGWVIDKACLLWQDQCG QQGSCLVYQNSAMSRYILIMGLLYK corresponding to amino acids 1-675 of S21C_HUMAN (SEQ ID NO:1062), which also corresponds to amino acids 1-675 of T23657_P2 (SEQ ID NO:1064), and a second amino acid sequence being at least 70%, optionally at least 80%, preferably at least 85%, more preferably at least 90% and most preferably at least 95% homologous to a polypeptide having the sequence FQLPEVHHSLNVLNRKFQKQTVHNL (SEQ ID NO:1455) corresponding to amino acids 676-700 of T23657_P2 (SEQ ID NO:1064), wherein said first amino acid sequence and second amino acid sequence are contiguous and in a sequential order.

[3229] 2. An isolated polypeptide encoding for a tail of T23657_P2 (SEQ ID NO:1064), comprising a polypeptide being at least 70%, optionally at least about 80%, preferably at least about 85%, more preferably at least about 90% and most preferably at least about 95% homologous to the sequence FQLPEVHHSLNVLNRKFQKQTVHNL (SEQ ID NO:1455) in T23657_P2 (SEQ ID NO:1064).

[3230] The location of the variant protein was determined according to results from a number of different software programs and analyses, including analyses from SignalP and other specialized programs. The variant protein is believed to be located as follows with regard to the cell: membrane. The protein localization is believed to be membrane because both trans-membrane region prediction programs predicted a trans-membrane region for this protein.

[3231] Variant protein T23657_P2 (SEQ ID NO:1064) also has the following non-silent SNPs (Single Nucleotide Polymorphisms) as listed in Table 11, (given according to their position(s) on the amino acid sequence, with the alternative amino acid(s) listed; the last column indicates whether the SNP is known or not; the presence of known SNPs in variant protein T23657_P2 (SEQ ID NO:1064) sequence provides support for the deduced sequence of this variant protein according to the present invention).

[3232] The glycosylation sites of variant protein T23657_P2 (SEQ ID NO:1064), as compared to the known protein Solute carrier family 21 member 12 (SEQ ID NO:1062), are described in Table 12 (given according to their position(s) on the amino acid sequence in the first column; the second column indicates whether the glycosylation site is present in the variant protein; and the last column indicates whether the position is different on the variant protein).

[3233] Variant protein T23657_P2 (SEQ ID NO:1064) is encoded by the following transcript(s): T23657_T2 (SEQ ID NO:1000), T23657_T7 (SEQ ID NO:1005), T23657_T16 (SEQ ID NO:1014) and T23657_T20 (SEQ ID NO:1017), for which the sequence(s) is/are given at the end of the application.

[3234] The coding portion of transcript T23657_T2 (SEQ ID NO:1000) is shown in bold; this coding portion starts at position 212 and ends at position 2311. The transcript also has the following SNPs as listed in Table 13 (given according to their position on the nucleotide sequence, with the alternative nucleic acid listed; the last column indicates whether the SNP is known or not; the presence of known SNPs in variant protein T23657_P2 (SEQ ID NO:1064) sequence provides support for the deduced sequence of this variant protein according to the present invention).

[3235] The coding portion of transcript T23657_T7 (SEQ ID NO:1005) is shown in bold; this coding portion starts at position 212 and ends at position 2311. The transcript also has the following SNPs as listed in Table 14 (given according to their position on the nucleotide sequence, with the alternative nucleic acid listed; the last column indicates whether the SNP is known or not; the presence of known SNPs in variant protein T23657_P2 (SEQ ID NO:1064) sequence provides support for the deduced sequence of this variant protein according to the present invention).

[3236] The coding portion of transcript T23657_T16 (SEQ ID NO:1014) is shown in bold; this coding portion starts at position 212 and ends at position 2311. The transcript also has the following SNPs as listed in Table 15 (given according to their position on the nucleotide sequence, with the alternative nucleic acid listed; the last column indicates whether the SNP is known or not; the presence of known SNPs in variant protein T23657_P2 (SEQ ID NO:1064) sequence provides support for the deduced sequence of this variant protein according to the present invention).

[3237] The coding portion of transcript T23657_T20 (SEQ ID NO:1017) is shown in bold; this coding portion starts at position 212 and ends at position 2311. The transcript also has the following SNPs as listed in Table 16 (given according to their position on the nucleotide sequence, with the alternative nucleic acid listed; the last column indicates whether the SNP is known or not; the presence of known SNPs in variant protein T23657_P2 (SEQ ID NO:1064) sequence provides support for the deduced sequence of this variant protein according to the present invention).

[3238] Variant protein T23657_P3 (SEQ ID NO:1065) according to the present invention has an amino acid sequence as given at the end of the application; it is encoded by transcript(s) T23657_T3 (SEQ ID NO:1001), T23657_T9 (SEQ ID NO:1007) and T23657_T21 (SEQ ID NO:1018). An alignment is given to the known protein (Solute carrier family 21 member 12 (SEQ ID NO:1062)) at the end of the application. One or more alignments to one or more previously published protein sequences are given at the end of the application. A brief description of the relationship of the variant protein according to the present invention to each such aligned protein is as follows:

[3239] Comparison report between T23657_P3 (SEQ ID NO:1065) and S21C_HUMAN (SEQ ID NO:1062):

[3240] 1. An isolated chimeric polypeptide encoding for T23657_P3 (SEQ ID NO:1065), comprising a first amino acid sequence being at least 90% homologous to MPLHQLGDKPLTFPSPNSAMENGLDHTPPSRRASPGTPLSPGSLRSAAHSPLDTSKQPLC QLWAEKHGARGTHEVRYVSAGQSVACGWWAFAPPCLQVLNTPKGILFFLCAAAFLQG MTVNGFINTVITSLERRYDLHSYQSGLIASSYDIAACLCLTFVSYFGGSGHKPRWLGWG VLLMGTGSLVFALPHFTAGRYEVELDAGVRTCPANPGAVCADSTSGLSRYQLVFMLG QFLHGVGATPLYTLGVTYLDENVKSSCSPVYIAIFYTAAILGPAAGYLIGGALLNIYTEM GRRTELTTESPLWVGAWWVGFLGSGAAAFFTAVPILGYPRQLPGSQRYAVMRAAEMH QLKDSSRGEASNPDFGKTIRDLPLSIWLLLKNPTFILLCLAGATEATLITGMSTFSPKFLES QFSLSASEAATLFGYLVVPAGGGGTFLGGFFVNKLRLRGSAVIKFCLFCTVVSLLGILVF SLHCPSVPMAGVTASYGGSLLPEGHLNLTAPCNAACSCQPEHYSPVCGSDGLMYFSLC HAGCPAATETNVDGQKVYRDCSCIPQNLSSGFGHATAGKCTSTCQRKPLLLVFIFVVIFF TFLSSIPALTATLRCVRDPQRSFALGIQWIVVRILGGIPGPIAFGWVIDKACLLWQDQCG QQGSCLVYQNSAMSRYILIMGLLYK corresponding to amino acids 1-675 of S21C_HUMAN (SEQ ID NO:1062), which also corresponds to amino acids 1-675 of T23657_P3 (SEQ ID NO:1065), and a second amino acid sequence being at least 70%, optionally at least 80%, preferably at least 85%, more preferably at least 90% and most preferably at least 95% homologous to a polypeptide having the sequence TIKHKAF corresponding to amino acids 676-682 of T23657_P3 (SEQ ID NO:1065), wherein said first amino acid sequence and second amino acid sequence are contiguous and in a sequential order.

[3241] 2. An isolated polypeptide encoding for a tail of T23657_P3 (SEQ ID NO:1065), comprising a polypeptide being at least 70%, optionally at least about 80%, preferably at least about 85%, more preferably at least about 90% and most preferably at least about 95% homologous to the sequence TIKHKAF in T23657_P3 (SEQ ID NO:1065).

[3242] The location of the variant protein was determined according to results from a number of different software programs and analyses, including analyses from SignalP and other specialized programs. The variant protein is believed to be located as follows with regard to the cell: membrane. The protein localization is believed to be membrane because both trans-membrane region prediction programs predicted a trans-membrane region for this protein.

[3243] Variant protein T23657_P3 (SEQ ID NO:1065) also has the following non-silent SNPs (Single Nucleotide Polymorphisms) as listed in Table 17, (given according to their position(s) on the amino acid sequence, with the alternative amino acid(s) listed; the last column indicates whether the SNP is known or not; the presence of known SNPs in variant protein T23657_P3 (SEQ ID NO:1065) sequence provides support for the deduced sequence of this variant protein according to the present invention).

[3244] The glycosylation sites of variant protein T23657_P3 (SEQ ID NO:1065), as compared to the known protein Solute carrier family 21 member 12 (SEQ ID NO:1062), are described in Table 18 (given according to their position(s) on the amino acid sequence in the first column; the second column indicates whether the glycosylation site is present in the variant protein; and the last column indicates whether the position is different on the variant protein).

[3245] Variant protein T23657_P3 (SEQ ID NO:1065) is encoded by the following transcript(s): T23657_T3 (SEQ ID NO:1001), T23657_T9 (SEQ ID NO:1007) and T23657_T21 (SEQ ID NO:1018, for which the sequence(s) is/are given at the end of the application.

[3246] The coding portion of transcript T23657_T3 (SEQ ID NO:1001) is shown in bold; this coding portion starts at position 212 and ends at position 2257. The transcript also has the following SNPs as listed in Table 19 (given according to their position on the nucleotide sequence, with the alternative nucleic acid listed; the last column indicates whether the SNP is known or not; the presence of known SNPs in variant protein T23657_P3 (SEQ ID NO:1065) sequence provides support for the deduced sequence of this variant protein according to the present invention).

[3247] The coding portion of transcript T23657_T9 (SEQ ID NO:1007) is shown in bold; this coding portion starts at position 212 and ends at position 2257. The transcript also has the following SNPs as listed in Table 20 (given according to their position on the nucleotide sequence, with the alternative nucleic acid listed; the last column indicates whether the SNP is known or not; the presence of known SNPs in variant protein T23657_P3 (SEQ ID NO:1065) sequence provides support for the deduced sequence of this variant protein according to the present invention).

[3248] The coding portion of transcript T23657_T21 (SEQ ID NO:1018) is shown in bold; this coding portion starts at position 212 and ends at position 2257. The transcript also has the following SNPs as listed in Table 21 (given according to their position on the nucleotide sequence, with the alternative nucleic acid listed; the last column indicates whether the SNP is known or not; the presence of known SNPs in variant protein T23657_P3 (SEQ ID NO:1065) sequence provides support for the deduced sequence of this variant protein according to the present invention).

[3249] Variant protein T23657_P4 (SEQ ID NO:1066) according to the present invention has an amino acid sequence as given at the end of the application; it is encoded by transcript(s) T23657_T4 (SEQ ID NO:1002). An alignment is given to the known protein (Solute carrier family 21 member 12 (SEQ ID NO:1062)) at the end of the application. One or more alignments to one or more previously published protein sequences are given at the end of the application. A brief description of the relationship of the variant protein according to the present invention to each such aligned protein is as follows:

[3250] Comparison report between T23657_P4 (SEQ ID NO:1066) and S21C_HUMAN (SEQ ID NO:1062):

[3251] 1. An isolated chimeric polypeptide encoding for T23657_P4 (SEQ ID NO:1066), comprising a first amino acid sequence being at least 90% homologous to MPLHQLGDKPLTFPSPNSAMENGLDHTPPSRRASPGTPLSPGSLRSAAHSPLDTSKQPLC QLWAEKHGARGTHEVRYVSAGQSVACGWWAFAPPCLQVLNTPKGILFFLCAAAFLQG MTVNGFINTVITSLERRYDLHSYQSGLIASSYDIAACLCLTFVSYFGGSGHKPRWLGWG VLLMGTGSLVFALPHFTAGRYEVELDAGVRTCPANPGAVCADSTSGLSRYQLVFMLG QFLHGVGATPLYTLGVTYLDENVKSSCSPVYIAIFYTAAILGPAAGYLIGGALLNIYTEM GRRTELTTESPLWVGAWWVGFLGSGAAAFFTAVPILGYPRQLPGSQRYAVMRAAEMH QLKDSSRGEASNPDFGKTIRDLPLSIWLLLKNPTFILLCLAGATEATLITGMSTFSPKFLES QFSLSASEAATLFGYLVVPAGGGGTFLGGFFVNKLRLRGSAVIKFCLFCTVVSLLGILVF SLHCPSVPMAGVTASYGGSLLPEGHLNLTAPCNAACSCQPEHYSPVCGSDGLMYFSLC HAGCPAATETNVDGQKVYRDCSCIPQNLSSGFGHATAGKCTSTCQRKPLLLVFIFVVIFF TFLSSIPALTATLRCVRDPQRSFALGIQWIVVRIL corresponding to amino acids 1-625 of S21C_HUMAN (SEQ ID NO:1062), which also corresponds to amino acids 1-625 of T23657_P4 (SEQ ID NO:1066), a second amino acid sequence being at least 70%, optionally at least 80%, preferably at least 85%, more preferably at least 90% and most preferably at least 95% homologous to a polypeptide having the sequence GTVQCEEAMVSCTVCSLHKGM (SEQ ID NO:1574) corresponding to amino acids 626-646 of T23657_P4 (SEQ ID NO:1066), a third amino acid sequence being at least 90% homologous to GGIPGPIAFGWVIDKACLLWQDQCGQQGSCLVYQNSAMSRYILIMGLLYK corresponding to amino acids 626-675 of S21 C_HUMAN (SEQ ID NO:1062), which also corresponds to amino acids 647-696 of T23657_P4 (SEQ ID NO:1066), and a fourth amino acid sequence being at least 70%, optionally at least 80%, preferably at least 85%, more preferably at least 90% and most preferably at least 95% homologous to a polypeptide having the sequence TIKHKAF corresponding to amino acids 697-703 of T23657_P4 (SEQ ID NO:1066), wherein said first amino acid sequence, second amino acid sequence, third amino acid sequence and fourth amino acid sequence are contiguous and in a sequential order.

[3252] 2. An isolated polypeptide encoding for an edge portion of T23657_P4 (SEQ ID NO:1066) comprising an amino acid sequence being at least 70%, optionally at least about 80%, preferably at least about 85%, more preferably at least about 90% and most preferably at least about 95% homologous to the sequence encoding for GTVQCEEAMVSCTVCSLHKGM (SEQ ID NO:1574), corresponding to T23657_P4 (SEQ ID NO:1066).

[3253] 3. An isolated polypeptide encoding for a tail of T23657_P4 (SEQ ID NO:1066), comprising a polypeptide being at least 70%, optionally at least about 80%, preferably at least about 85%, more preferably at least about 90% and most preferably at least about 95% homologous to the sequence TIKHKAF in T23657_P4 (SEQ ID NO:1066).

[3254] The location of the variant protein was determined according to results from a number of different software programs and analyses, including analyses from SignalP and other specialized programs. The variant protein is believed to be located as follows with regard to the cell: membrane. The protein localization is believed to be membrane because both trans-membrane region prediction programs predicted a trans-membrane region for this protein.

[3255] Variant protein T23657_P4 (SEQ ID NO:1066) also has the following non-silent SNPs (Single Nucleotide Polymorphisms) as listed in Table 22, (given according to their position(s) on the amino acid sequence, with the alternative amino acid(s) listed; the last column indicates whether the SNP is known or not; the presence of known SNPs in variant protein T23657_P4 (SEQ ID NO:1066) sequence provides support for the deduced sequence of this variant protein according to the present invention).

[3256] The glycosylation sites of variant protein T23657_P4 (SEQ ID NO:1066), as compared to the known protein Solute carrier family 21 member 12 (SEQ ID NO:1062), are described in Table 23 (given according to their position(s) on the amino acid sequence in the first column; the second column indicates whether the glycosylation site is present in the variant protein; and the last column indicates whether the position is different on the variant protein).

[3257] Variant protein T23657_P4 (SEQ ID NO:1066) is encoded by the following transcript(s): T23657_T4 (SEQ ID NO:1002), for which the sequence(s) is/are given at the end of the application. The coding portion of transcript T23657_T4 (SEQ ID NO:1002) is shown in bold; this coding portion starts at position 212 and ends at position 2320. The transcript also has the following SNPs as listed in Table 24 (given according to their position on the nucleotide sequence, with the alternative nucleic acid listed; the last column indicates whether the SNP is known or not; the presence of known SNPs in variant protein T23657_P4 (SEQ ID NO:1066) sequence provides support for the deduced sequence of this variant protein according to the present invention).

[3258] Variant protein T23657_P5 (SEQ ID NO:1067) according to the present invention has an amino acid sequence as given at the end of the application; it is encoded by transcript(s) T23657_T5 (SEQ ID NO:1003) and T23657_T6 (SEQ ID NO:1004). An alignment is given to the known protein (Solute carrier family 21 member 12 (SEQ ID NO:1062)) at the end of the application. One or more alignments to one or more previously published protein sequences are given at the end of the application. A brief description of the relationship of the variant protein according to the present invention to each such aligned protein is as follows:

[3259] Comparison report between T23657_P5 (SEQ ID NO:1067) and S21C_HUMAN (SEQ ID NO:1062):

[3260] 1. An isolated chimeric polypeptide encoding for T23657_P5 (SEQ ID NO:1067), comprising a first amino acid sequence being at least 90% homologous to MPLHQLGDKPLTFPSPNSAMENGLDHTPPSRRASPGTPLSPGSLRSAAHSPLDTSKQPLC QLWAEKHGARGTHEVRYVSAGQSVACGWWAFAPPCLQVLNTPKGILFFLCAAAFLQG MTVNGFINTVITSLERRYDLHSYQSGLIASSYDIAACLCLTFVSYFGGSGHKPRWLGWG VLLMGTGSLVFALPHFTAGRYEVELDAGVRTCPANPGAVCADSTSGLSRYQLVFMLG QFLHGVGATPLYTLGVTYLDENVKSSCSPVYIAIFYTAAILGPAAGYLIGGALLNIYTEM GRRTELTTESPLWVGAWWVGFLGSGAAAFFTAVPILGYPRQLPGSQRYAVMRAAEMH QLKDSSRGEASNPDFGKTIRDLPLSIWLLLKNPTFILLCLAGATEATLITGMSTFSPKFLES QFSLSASEAATLFGYLVVPAGGGGTFLGGFFVNKLRLRGSAVIKFCLFCTVVSLLGILVF SLHCPSVPMAGVTASYGGSLLPEGHLNLTAPCNAACSCQPEHYSPVCGSDGLMYFSLC HAGCPAATETNVDGQKVYRDCSCIPQNLSSGFGHATAGKCTSTCQRKPLLLVFIFVVIFF TFLSSIPALTATLR corresponding to amino acids 1-604 of S21C_HUMAN (SEQ ID NO:1062), which also corresponds to amino acids 1-604 of T23657_P5 (SEQ ID NO:1067).

[3261] The location of the variant protein was determined according to results from a number of different software programs and analyses, including analyses from SignalP and other specialized programs. The variant protein is believed to be located as follows with regard to the cell: membrane. The protein localization is believed to be membrane because both trans-membrane region prediction programs predicted a trans-membrane region for this protein.

[3262] Variant protein T23657_P5 (SEQ ID NO:1067) also has the following non-silent SNPs (Single Nucleotide Polymorphisms) as listed in Table 25, (given according to their position(s) on the amino acid sequence, with the alternative amino acid(s) listed; the last column indicates whether the SNP is known or not; the presence of known SNPs in variant protein T23657_P5 (SEQ ID NO:1067) sequence provides support for the deduced sequence of this variant protein according to the present invention).

[3263] The glycosylation sites of variant protein T23657_P5 (SEQ ID NO:1067), as compared to the known protein Solute carrier family 21 member 12 (SEQ ID NO:1062), are described in Table 26 (given according to their position(s) on the amino acid sequence in the first column; the second column indicates whether the glycosylation site is present in the variant protein; and the last column indicates whether the position is different on the variant protein).

[3264] Variant protein T23657_P5 (SEQ ID NO:1067) is encoded by the following transcript(s): T23657_T5 (SEQ ID NO:1003) and T23657_T6 (SEQ ID NO:1004), for which the sequence(s) is/are given at the end of the application.

[3265] The coding portion of transcript T23657_T5 (SEQ ID NO:1003) is shown in bold; this coding portion starts at position 212 and ends at position 2023. The transcript also has the following SNPs as listed in Table 27 (given according to their position on the nucleotide sequence, with the alternative nucleic acid listed; the last column indicates whether the SNP is known or not; the presence of known SNPs in variant protein T23657_P5 (SEQ ID NO:1067) sequence provides support for the deduced sequence of this variant protein according to the present invention).

[3266] The coding portion of transcript T23657_T6 (SEQ ID NO:1004) is shown in bold; this coding portion starts at position 212 and ends at position 2023. The transcript also has the following SNPs as listed in Table 28 (given according to their position on the nucleotide sequence, with the alternative nucleic acid listed; the last column indicates whether the SNP is known or not; the presence of known SNPs in variant protein T23657_P5 (SEQ ID NO:1067) sequence provides support for the deduced sequence of this variant protein according to the present invention).

[3267] Variant protein T23657_P6 (SEQ ID NO:1068) according to the present invention has an amino acid sequence as given at the end of the application; it is encoded by transcript(s) T23657_T10 (SEQ ID NO:1008). An alignment is given to the known protein (Solute carrier family 21 member 12 (SEQ ID NO:1062)) at the end of the application. One or more alignments to one or more previously published protein sequences are given at the end of the application. A brief description of the relationship of the variant protein according to the present invention to each such aligned protein is as follows:

[3268] Comparison report between T23657_P6 (SEQ ID NO:1068) and S21C_HUMAN (SEQ ID NO:1062):

[3269] 1. An isolated chimeric polypeptide encoding for T23657_P6 (SEQ ID NO:1068), comprising a first amino acid sequence being at least 90% homologous to MPLHQLGDKPLTFPSPNSAMENGLDHTPPSRRASPGTPLSPGSLRSAAHSPLDTSKQPLC QLWAEKHGARGTHEVRYVSAGQSVACGWWAFAPPCLQVLNTPKGILFFLCAAAFLQG MTVNGFINTVITSLERRYDLHSYQSGLIASSYDIAACLCLTFVSYFGGSGHKPRWLGWG VLLMGTGSLVFALPHFTAGRYEVELDAGVRTCPANPGAVCADSTSGLSRYQLVFMLG QFLHGVGATPLYTLGVTYLDENVKSSCSPVYIAIFYTAAILGPAAGYLIGGALLNIYTEM GRRTELTTESPLWVGAWWVGFLGSGAAAFFTAVPILGYPRQLPGSQRYAVMRAAEMH QLKDSSRGEASNPDFGKTIRDLPLSIWLLLKNPTFILLCLAGATEATLITGMSTFSPKFLES QFSLSASEAATLFGYLVVPAGGGGTFLGGFFVNKLRLRGSAVIKFCLFCTVVSLLGILVF SLHCPSVPMAGVTASYGGSLLPEGHLNLTAPCNAACSCQPEHYSPVCGSDGLMYFSLC HAGCPAATETNVDGQKV corresponding to amino acids 1-547 of S21 C_HUMAN (SEQ ID NO:1062), which also corresponds to amino acids 1-547 of T23657_P6 (SEQ ID NO:1068), and a second amino acid sequence being at least 70%, optionally at least 80%, preferably at least 85%, more preferably at least 90% and most preferably at least 95% homologous to a polypeptide having the sequence SGAAAYRPCPPLDPGKGPPCLPLVIGAIVGLPRCTETVAVSLRIFPLVLAMPLQGNALQL VRESPSFWFSYSL (SEQ ID NO:1458) corresponding to amino acids 548-620 of T23657_P6 (SEQ ID NO:1068), wherein said first amino acid sequence and second amino acid sequence are contiguous and in a sequential order.

[3270] 2. An isolated polypeptide encoding for a tail of T23657_P6 (SEQ ID NO:1068), comprising a polypeptide being at least 70%, optionally at least about 80%, preferably at least about 85%, more preferably at least about 90% and most preferably at least about 95% homologous to the sequence SGAAAYRPCPPLDPGKGPPCLPLVIGAIVGLPRCTETVAVSLRIFPLVLAMPLQGNALQL VRESPSFWFSYSL (SEQ ID NO:1458) in T23657_P6 (SEQ ID NO:1068).

[3271] The location of the variant protein was determined according to results from a number of different software programs and analyses, including analyses from SignalP and other specialized programs. The variant protein is believed to be located as follows with regard to the cell: membrane. The protein localization is believed to be membrane because both trans-membrane region prediction programs predicted a trans-membrane region for this protein.

[3272] Variant protein T23657_P6 (SEQ ID NO:1068) also has the following non-silent SNPs (Single Nucleotide Polymorphisms) as listed in Table 29, (given according to their position(s) on the amino acid sequence, with the alternative amino acid(s) listed; the last column indicates whether the SNP is known or not; the presence of known SNPs in variant protein T23657_P6 (SEQ ID NO:1068) sequence provides support for the deduced sequence of this variant protein according to the present invention).

[3273] The glycosylation sites of variant protein T23657_P6 (SEQ ID NO:1068), as compared to the known protein Solute carrier family 21 member 12 (SEQ ID NO:1062), are described in Table 30 (given according to their position(s) on the amino acid sequence in the first column; the second column indicates whether the glycosylation site is present in the variant protein; and the last column indicates whether the position is different on the variant protein).

[3274] Variant protein T23657_P6 (SEQ ID NO:1068) is encoded by the following transcript(s): T23657_T10 (SEQ ID NO:1008), for which the sequence(s) is/are given at the end of the application. The coding portion of transcript T23657_T1 (SEQ ID NO:1008) is shown in bold; this coding portion starts at position 212 and ends at position 2071. The transcript also has the following SNPs as listed in Table 31 (given according to their position on the nucleotide sequence, with the alternative nucleic acid listed; the last column indicates whether the SNP is known or not; the presence of known SNPs in variant protein T23657_P6 (SEQ ID NO:1068) sequence provides support for the deduced sequence of this variant protein according to the present invention).

[3275] Variant protein T23657_P7 (SEQ ID NO:1069) according to the present invention has an amino acid sequence as given at the end of the application; it is encoded by transcript(s) T23657_T12 (SEQ ID NO:1010), T23657_T17 (SEQ ID NO:1015) and T23657_T22 (SEQ ID NO:1019). An alignment is given to the known protein (Solute carrier family 21 member 12 (SEQ ID NO:1062)) at the end of the application. One or more alignments to one or more previously published protein sequences are given at the end of the application. A brief description of the relationship of the variant protein according to the present invention to each such aligned protein is as follows:

[3276] Comparison report between T23657_P7 (SEQ ID NO:1069) and S21C_HUMAN (SEQ ID NO:1062):

[3277] 1. An isolated chimeric polypeptide encoding for T23657_P7 (SEQ ID NO:1069), comprising a first amino acid sequence being at least 90% homologous to MPLHQLGDKPLTFPSPNSAMENGLDHTPPSRRASPGTPLSPGSLRSAAHSPLDTSKQPLC QLWAEKHGARGTHEVRYVSAGQSVACGWWAFAPPCLQVLNTPKGILFFLCAAAFLQG MTVNGFINTVITSLERRYDLHSYQSGLIASSYDIAACLCLTFVSYFGGSGHKPRWLGWG VLLMGTGSLVFALPHFTAGRYEVELDAGVRTCPANPGAVCADSTSGLSRYQLVFMLG QFLHGVGATPLYTLGVTYLDENVKSSCSPVYIAIFYTAAILGPAAGYLIGGALLNIYTEM GRRTELTTESPLWVGAWWVGFLGSGAAAFFTAVPILGYPRQLPGSQRYAVMRAAEMH QLKDSSRGEASNPDFGKTIRDLPLSIWLLLKNPTFILLCLAGATEATLITGMSTFSPKFLES QFSLSASEAATLFGYLVVPAGGGGTFLGGFFVNKLRLRGSAVIKFCLFCTVVSLLGILVF SLHCPSVPMAGVTASYGGSLLPEGHLNLTAPCNAACSCQPEHYSPVCGSDGLMYFSLC HAGCPAATETNVDGQK corresponding to amino acids 1-546 of S21 C_HUMAN (SEQ ID NO:1062), which also corresponds to amino acids 1-546 of T23657_P7 (SEQ ID NO:1069), and a second amino acid sequence being at least 70%, optionally at least 80%, preferably at least 85%, more preferably at least 90% and most preferably at least 95% homologous to a polypeptide having the sequence MCP corresponding to amino acids 547-549 of T23657_P7 (SEQ ID NO:1069), wherein said first amino acid sequence and second amino acid sequence are contiguous and in a sequential order.

[3278] The location of the variant protein was determined according to results from a number of different software programs and analyses, including analyses from SignalP and other specialized programs. The variant protein is believed to be located as follows with regard to the cell: membrane. The protein localization is believed to be membrane because both trans-membrane region prediction programs predicted a trans-membrane region for this protein.

[3279] Variant protein T23657_P7 (SEQ ID NO:1069) also has the following non-silent SNPs (Single Nucleotide Polymorphisms) as listed in Table 32, (given according to their position(s) on the amino acid sequence, with the alternative amino acid(s) listed; the last column indicates whether the SNP is known or not; the presence of known SNPs in variant protein T23657_P7 (SEQ ID NO:1069) sequence provides support for the deduced sequence of this variant protein according to the present invention).

[3280] The glycosylation sites of variant protein T23657_P7 (SEQ ID NO:1069), as compared to the known protein Solute carrier family 21 member 12 (SEQ ID NO:1062), are described in Table 33 (given according to their position(s) on the amino acid sequence in the first column; the second column indicates whether the glycosylation site is present in the variant protein; and the last column indicates whether the position is different on the variant protein).

[3281] Variant protein T23657_P7 (SEQ ID NO:1069) is encoded by the following transcript(s): T23657_T12 (SEQ ID NO:1010), T23657_T17 (SEQ ID NO:1015) and T23657_T22 (SEQ ID NO:1019, for which the sequence(s) is/are given at the end of the application.

[3282] The coding portion of transcript T23657_T12 (SEQ ID NO:1010) is shown in bold; this coding portion starts at position 212 and ends at position 1858. The transcript also has the following SNPs as listed in Table 34 (given according to their position on the nucleotide sequence, with the alternative nucleic acid listed; the last column indicates whether the SNP is known or not; the presence of known SNPs in variant protein T23657_P7 (SEQ ID NO:1069) sequence provides support for the deduced sequence of this variant protein according to the present invention).

[3283] The coding portion of transcript T23657_T17 (SEQ ID NO:1015) is shown in bold; this coding portion starts at position 212 and ends at position 1858. The transcript also has the following SNPs as listed in Table 35 (given according to their position on the nucleotide sequence, with the alternative nucleic acid listed; the last column indicates whether the SNP is known or not; the presence of known SNPs in variant protein T23657_P7 (SEQ ID NO:1069) sequence provides support for the deduced sequence of this variant protein according to the present invention).

[3284] The coding portion of transcript T23657_T22 (SEQ ID NO:1019) is shown in bold; this coding portion starts at position 212 and ends at position 1858. The transcript also has the following SNPs as listed in Table 36 (given according to their position on the nucleotide sequence, with the alternative nucleic acid listed; the last column indicates whether the SNP is known or not; the presence of known SNPs in variant protein T23657_P7 (SEQ ID NO:1069) sequence provides support for the deduced sequence of this variant protein according to the present invention).

[3285] Variant protein T23657_P8 (SEQ ID NO:1070) according to the present invention has an amino acid sequence as given at the end of the application; it is encoded by transcript(s) T23657_T13 (SEQ ID NO:1011), T23657_T19 (SEQ ID NO:1016) and T23657_T28 (SEQ ID NO:1022). An alignment is given to the known protein (Solute carrier family 21 member 12 (SEQ ID NO:1062)) at the end of the application. One or more alignments to one or more previously published protein sequences are given at the end of the application. A brief description of the relationship of the variant protein according to the present invention to each such aligned protein is as follows:

[3286] Comparison report between T23657_P8 (SEQ ID NO:1070) and S21C_HUMAN (SEQ ID NO:1062):

[3287] 1. An isolated chimeric polypeptide encoding for T23657_P8 (SEQ ID NO:1070), comprising a first amino acid sequence being at least 90% homologous to MPLHQLGDKPLTFPSPNSAMENGLDHTPPSRRASPGTPLSPGSLRSAAHSPLDTSKQPLC QLWAEKHGARGTHEVRYVSAGQSVACGWWAFAPPCLQVLNTPKGILFFLCAAAFLQG MTVNGFINTVITSLERRYDLHSYQSGLIASSYDIAACLCLTFVSYFGGSGHKPRWLGWG VLLMGTGSLVFALPHFTAGRYEVELDAGVRTCPANPGAVCADSTSGLSRYQLVFMLG QFLHGVGATPLYTLGVTYLDENVKSSCSPVYIAIFYTAAILGPAAGYLIGGALLNIYTEM GRRTELTTESPLWVGAWWVGFLGSGAAAFFTAVPILGYPRQLPGSQRYAVMRAAEMH QLKDSSRGEASNPDFGKTIRDLPLSIWLLLKNPTFILLCLAGATEATLITGMSTFSPKFLES QFSLSASEAATLFGYLVVPAGGGGTFLGGFFVNKLRLRGSAVIKFCLFCTVVSLLGILVF SLHCPSVPMAGVTASYGGSLLPEGHLNLTAPCNAACSCQPEHYSPVCGSDGLMYFSLC HAGCPAATETNVDGQK corresponding to amino acids 1-546 of S21 C_HUMAN (SEQ ID NO:1062), which also corresponds to amino acids 1-546 of T23657_P8 (SEQ ID NO:1070), and a second amino acid sequence being at least 70%, optionally at least 80%, preferably at least 85%, more preferably at least 90% and most preferably at least 95% homologous to a polypeptide having the sequence QHSCTNGNSTMCP (SEQ ID NO:1459) corresponding to amino acids 547-559 of T23657_P8 (SEQ ID NO:1070), wherein said first amino acid sequence and second amino acid sequence are contiguous and in a sequential order.

[3288] 2. An isolated polypeptide encoding for a tail of T23657_P8 (SEQ ID NO:1070), comprising a polypeptide being at least 70%, optionally at least about 80%, preferably at least about 85%, more preferably at least about 90% and most preferably at least about 95% homologous to the sequence QHSCTNGNSTMCP (SEQ ID NO:1459) in T23657_P8 (SEQ ID NO:1070).

[3289] The location of the variant protein was determined according to results from a number of different software programs and analyses, including analyses from SignalP and other specialized programs. The variant protein is believed to be located as follows with regard to the cell: membrane. The protein localization is believed to be membrane because both trans-membrane region prediction programs predicted a trans-membrane region for this protein.

[3290] Variant protein T23657_P8 (SEQ ID NO:1070) also has the following non-silent SNPs (Single Nucleotide Polymorphisms) as listed in Table 37, (given according to their position(s) on the amino acid sequence, with the alternative amino acid(s) listed; the last column indicates whether the SNP is known or not; the presence of known SNPs in variant protein T23657_P8 (SEQ ID NO:1070) sequence provides support for the deduced sequence of this variant protein according to the present invention).

[3291] The glycosylation sites of variant protein T23657_P8 (SEQ ID NO:1070), as compared to the known protein Solute carrier family 21 member 12 (SEQ ID NO:1062), are described in Table 38 (given according to their position(s) on the amino acid sequence in the first column; the second column indicates whether the glycosylation site is present in the variant protein; and the last column indicates whether the position is different on the variant protein).

[3292] Variant protein T23657_P8 (SEQ ID NO:1070) is encoded by the following transcript(s): T23657_T13 (SEQ ID NO:1011), T23657_T19 (SEQ ID NO:1016) and T23657_T28 (SEQ ID NO:1022), for which the sequence(s) is/are given at the end of the application.

[3293] The coding portion of transcript T23657_T13 (SEQ ID NO:1011) is shown in bold; this coding portion starts at position 212 and ends at position 1888. The transcript also has the following SNPs as listed in Table 39 (given according to their position on the nucleotide sequence, with the alternative nucleic acid listed; the last column indicates whether the SNP is known or not; the presence of known SNPs in variant protein T23657_P8 (SEQ ID NO:1070) sequence provides support for the deduced sequence of this variant protein according to the present invention).

[3294] The coding portion of transcript T23657_T19 (SEQ ID NO:1016) is shown in bold; this coding portion starts at position 212 and ends at position 1888. The transcript also has the following SNPs as listed in Table 40 (given according to their position on the nucleotide sequence, with the alternative nucleic acid listed; the last column indicates whether the SNP is known or not; the presence of known SNPs in variant protein T23657_P8 (SEQ ID NO:1070) sequence provides support for the deduced sequence of this variant protein according to the present invention).

[3295] The coding portion of transcript T23657_T28 (SEQ ID NO:1022) is shown in bold; this coding portion starts at position 212 and ends at position 1888. The transcript also has the following SNPs as listed in Table 41 (given according to their position on the nucleotide sequence, with the alternative nucleic acid listed; the last column indicates whether the SNP is known or not; the presence of known SNPs in variant protein T23657_P8 (SEQ ID NO:1070) sequence provides support for the deduced sequence of this variant protein according to the present invention).

[3296] Variant protein T23657_P9 (SEQ ID NO:1071) according to the present invention has an amino acid sequence as given at the end of the application; it is encoded by transcript(s) T23657_T14 (SEQ ID NO:1012). The location of the variant protein was determined according to results from a number of different software programs and analyses, including analyses from SignalP and other specialized programs. The variant protein is believed to be located as follows with regard to the cell: secreted. The protein localization is believed to be secreted because one of the two signal-peptide prediction programs (HMM: Signal peptide,NN:NO) predicts that this protein has a signal peptide.

[3297] Variant protein T23657_P9 (SEQ ID NO:1071) also has the following non-silent SNPs (Single Nucleotide Polymorphisms) as listed in Table 42, (given according to their position(s) on the amino acid sequence, with the alternative amino acid(s) listed; the last column indicates whether the SNP is known or not; the presence of known SNPs in variant protein T23657_P9 (SEQ ID NO:1071) sequence provides support for the deduced sequence of this variant protein according to the present invention).

[3298] Variant protein T23657_P9 (SEQ ID NO:1071) is encoded by the following transcript(s): T23657_T14 (SEQ ID NO:1012), for which the sequence(s) is/are given at the end of the application. The coding portion of transcript T23657_T14 (SEQ ID NO:1012) is shown in bold; this coding portion starts at position 573 and ends at position 1772. The transcript also has the following SNPs as listed in Table 43 (given according to their position on the nucleotide sequence, with the alternative nucleic acid listed; the last column indicates whether the SNP is known or not; the presence of known SNPs in variant protein T23657_P9 (SEQ ID NO:1071) sequence provides support for the deduced sequence of this variant protein according to the present invention).

[3299] Variant protein T23657_P10 (SEQ ID NO:1072) according to the present invention has an amino acid sequence as given at the end of the application; it is encoded by transcript(s) T23657_T15 (SEQ ID NO:1013). An alignment is given to the known protein (Solute carrier family 21 member 12 (SEQ ID NO:1062)) at the end of the application. One or more alignments to one or more previously published protein sequences are given at the end of the application. A brief description of the relationship of the variant protein according to the present invention to each such aligned protein is as follows:

[3300] Comparison report between T23657_P10 (SEQ ID NO:1072) and S21C_HUMAN (SEQ ID NO:1062):

[3301] 1. An isolated chimeric polypeptide encoding for T23657_P10 (SEQ ID NO:1072), comprising a first amino acid sequence being at least 90% homologous to MPLHQLGDKPLTFPSPNSAMENGLDHTPPSRRASPGTPLSPGSLRSAAHSPLDTSKQPLC QLWAEKHGARGTHEVRYVSAGQSVACGWWAFAPPCLQVLNTPKGILFFLCAAAFLQG MTVNGFINTVITSLERRYDLHSYQSGLIASSYDIAACLCLTFVSYFGGSGHKPRWLGWG VLLMGTGSLVFALPHFTAGRYEVELDAGVRTCPANPGAVCADSTSGLSRYQLVFMLG QFLHGVGATPLYTLGVTYLDENVKSSCSPVYIAIFYTAAILGPAAGYLIGGALLNIYTEM GRRTELTTESPLWVGAWWVGFLGSGAAAFFTAVPILGYPRQLPGSQRYAVMRAAEMH QLKDSSRGEASNPDFGKTIRDLPLSIWLLLKNPTFILLCLAGATEATLITGMSTFSPKFLES QFSLSASEAATLFGYLVVPAGGGGTFLGGFFVNKLRLRGSAVIKFCLFCTVVSLLGILVF SLHCPSVPMAGVTASYGGSLLPEGHLNLTAPCNAACSCQPEHYSPVCGSDGLMYFSLC HAGCPAATETNVDGQKVYRDCSCIPQNLSSGFGHATAGKCTSTCQRKPLLLVFIFVVIFF TFLSSIPALTATLRCVRDPQRSFALGIQWIVVRIL corresponding to amino acids 1-625 of S21C_HUMAN (SEQ ID NO:1062), which also corresponds to amino acids 1-625 of T23657_P10 (SEQ ID NO:1072), a second amino acid sequence being at least 70%, optionally at least 80%, preferably at least 85%, more preferably at least 90% and most preferably at least 95% homologous to a polypeptide having the sequence GTVQCEEAMVSCTVCSLHKGM (SEQ ID NO:1574) corresponding to amino acids 626-646 of T23657_P10 (SEQ ID NO:1072), and a third amino acid sequence being at least 90% homologous to GGIPGPIAFGWVIDKACLLWQDQCGQQGSCLVYQNSAMSRYILIMGLLYKVLGVLFFAI ACFLYKPLSESSDGLETCLPSQSSAPDSATDSQLQSSV corresponding to amino acids 626-722 of S21 C_HUMAN (SEQ ID NO:1062), which also corresponds to amino acids 647-743 of T23657_P10 (SEQ ID NO:1072), wherein said first amino acid sequence, second amino acid sequence and third amino acid sequence are contiguous and in a sequential order.

[3302] 2. An isolated polypeptide encoding for an edge portion of T23657_P10 (SEQ ID NO:1072), comprising an amino acid sequence being at least 70%, optionally at least about 80%, preferably at least about 85%, more preferably at least about 90% and most preferably at least about 95% homologous to the sequence encoding for GTVQCEEAMVSCTVCSLHKGM (SEQ ID NO:1574), corresponding to T23657_P10 (SEQ ID NO:1072).

[3303] The location of the variant protein was determined according to results from a number of different software programs and analyses, including analyses from SignalP and other specialized programs. The variant protein is believed to be located as follows with regard to the cell: membrane. The protein localization is believed to be membrane because both trans-membrane region prediction programs predicted a trans-membrane region for this protein.

[3304] Variant protein T23657_P10 (SEQ ID NO:1072) also has the following non-silent SNPs (Single Nucleotide Polymorphisms) as listed in Table 44, (given according to their position(s) on the amino acid sequence, with the alternative amino acid(s) listed; the last column indicates whether the SNP is known or not; the presence of known SNPs in variant protein T23657_P10 (SEQ ID NO:1072) sequence provides support for the deduced sequence of this variant protein according to the present invention).

[3305] The glycosylation sites of variant protein T23657_P10 (SEQ ID NO:1072), as compared to the known protein Solute carrier family 21 member 12 (SEQ ID NO:1062), are described in Table 45 (given according to their position(s) on the amino acid sequence in the first column; the second column indicates whether the glycosylation site is present in the variant protein; and the last column indicates whether the position is different on the variant protein).

[3306] Variant protein T23657_P10 (SEQ ID NO:1072) is encoded by the following transcript(s): T23657_T15 (SEQ ID NO:1013), for which the sequence(s) is/are given at the end of the application. The coding portion of transcript T23657_T15 (SEQ ID NO:1013) is shown in bold; this coding portion starts at position 212 and ends at position 2440. The transcript also has the following SNPs as listed in Table 46 (given according to their position on the nucleotide sequence, with the alternative nucleic acid listed; the last column indicates whether the SNP is known or not; the presence of known SNPs in variant protein T23657_P10 (SEQ ID NO:1072) sequence provides support for the deduced sequence of this variant protein according to the present invention).

[3307] Variant protein T23657_P11 (SEQ ID NO:1073) according to the present invention has an amino acid sequence as given at the end of the application; it is encoded by transcript(s) T23657_T23 (SEQ ID NO:1020). An alignment is given to the known protein (Solute carrier family 21 member 12 (SEQ ID NO:1062)) at the end of the application. One or more alignments to one or more previously published protein sequences are given at the end of the application. A brief description of the relationship of the variant protein according to the present invention to each such aligned protein is as follows:

[3308] Comparison report between T23657_P11 (SEQ ID NO:1073) and S21 C_HUMAN (SEQ ID NO:1062):

[3309] 1. An isolated chimeric polypeptide encoding for T23657_P11 (SEQ ID NO:1073), comprising a first amino acid sequence being at least 90% homologous to MPLHQLGDKPLTFPSPNSAMENGLDHTPPSRRASPGTPLSPGSLRSAAHSPLDTSKQPLC QLWAEKHGARGTHEVRYVSAGQSVACGWWAFAPPCLQVLNTPKGILFFLCAAAFLQG MTVNGFINTVITSLERRYDLHSYQSGLIASSYDIAACLCLTFVSYFGGSGHKPRWLGWG VLLMGTGSLVFALPHFTAGRYEVELDAGVRTCPANPGAVCADSTSGLSRYQLVFMLG QFLHGVGATPLYTLGVTYLDENVKSSCSPVYIAIFYTAAILGPAAGYLIGGALLNIYTEM GRRTELTTESPLWVGAWWVGFLGSGAAAFFTAVPILGYPRQLPGSQRYAVMRAAEMH QLKDSSRGEASNPDFGKTIRDLPLSIWLLLKNPTFILLCLAGATEATLITGMSTFSPKFLES QFSLSASEAATLF corresponding to amino acids 1-425 of S21C_HUMAN (SEQ ID NO:1062), which also corresponds to amino acids 1-425 of T23657_P11 (SEQ ID NO:1073), and a second amino acid sequence being at least 70%, optionally at least 80%, preferably at least 85%, more preferably at least 90% and most preferably at least 95% homologous to a polypeptide having the sequence ASCPKAT (SEQ ID NO:1460) corresponding to amino acids 426-432 of T23657_P11 (SEQ ID NO:1073), wherein said first amino acid sequence and second amino acid sequence are contiguous and in a sequential order.

[3310] 2. An isolated polypeptide encoding for a tail of T23657_P11 (SEQ ID NO:1073), comprising a polypeptide being at least 70%, optionally at least about 80%, preferably at least about 85%, more preferably at least about 90% and most preferably at least about 95% homologous to the sequence ASCPKAT (SEQ ID NO:1460) in T23657_P11 (SEQ ID NO:1073).

[3311] The location of the variant protein was determined according to results from a number of different software programs and analyses, including analyses from SignalP and other specialized programs. The variant protein is believed to be located as follows with regard to the cell: membrane. The protein localization is believed to be membrane because both trans-membrane region prediction programs predicted a trans-membrane region for this protein.

[3312] Variant protein T23657_P11 (SEQ ID NO:1073) also has the following non-silent SNPs (Single Nucleotide Polymorphisms) as listed in Table 47, (given according to their position(s) on the amino acid sequence, with the alternative amino acid(s) listed; the last column indicates whether the SNP is known or not; the presence of known SNPs in variant protein T23657_P11 (SEQ ID NO:1073) sequence provides support for the deduced sequence of this variant protein according to the present invention).

[3313] The glycosylation sites of variant protein T23657_P11 (SEQ ID NO:1073), as compared to the known protein Solute carrier family 21 member 12 (SEQ ID NO:1062), are described in Table 48 (given according to their position(s) on the amino acid sequence in the first column; the second column indicates whether the glycosylation site is present in the variant protein; and the last column indicates whether the position is different on the variant protein).

[3314] Variant protein T23657_P11 (SEQ ID NO:1073) is encoded by the following transcript(s): T23657_T23 (SEQ ID NO:1020), for which the sequence(s) is/are given at the end of the application. The coding portion of transcript T23657_T23 (SEQ ID NO:1020) is shown in bold; this coding portion starts at position 212 and ends at position 1507. The transcript also has the following SNPs as listed in Table 49 (given according to their position on the nucleotide sequence, with the alternative nucleic acid listed; the last column indicates whether the SNP is known or not; the presence of known SNPs in variant protein T23657_P11 (SEQ ID NO:1073) sequence provides support for the deduced sequence of this variant protein according to the present invention).

[3315] Variant protein T23657_P12 (SEQ ID NO:1074) according to the present invention has an amino acid sequence as given at the end of the application; it is encoded by transcript(s) T23657_T24 (SEQ ID NO:1021). An alignment is given to the known protein (Solute carrier family 21 member 12 (SEQ ID NO:1062)) at the end of the application. One or more alignments to one or more previously published protein sequences are given at the end of the application. A brief description of the relationship of the variant protein according to the present invention to each such aligned protein is as follows:

[3316] Comparison report between T23657_P12 (SEQ ID NO:10741 and S21C_HUMAN (SEQ ID NO:1062):

[3317] 1. An isolated chimeric polypeptide encoding for T23657_P12 (SEQ ID NO:1074), comprising a first amino acid sequence being at least 90% homologous to MPLHQLGDKPLTFPSPNSAMENGLDHTPPSRRASPGTPLSPGSLRSAAHSPLDTSKQPLC QLWAEKHGARGTHEVRYVSAGQSVACGWWAFAPPCLQVLNTPKGILFFLCAAAFLQG MTVNGFINTVITSLERRYDLHSYQSGLIASSYDIAACLCLTFVSYFGGSGHKPRWLGWG VLLMGTGSLVFALPHFTAGRYEVELDAGVRTCPANPGAVCADSTSGLSRYQLVFMLG QFLHGVGATPLYTLGVTYLDENVKSSCSPVYIAIFYTAAILGPAAGYLIGGALLNIYTEM GRRTELTTESPLWVGAWWVGFLGSGAAAFFTAVPILGYPRQLPGSQRYAVMRAAEMH QLKDSSRGEASNPDFGKTIRDLPLSIWLLLKNPTFILLCLAGATEATLITGMSTFSPKFLES QFSLSASEAATLFGYLVVPAGGGGTFLGGFFVNKLRLRGSAVIKFCLFCTVVSLLGILVF SLHCPSVPMAGVTASYGGSLLPEGHLNLTAPCNAACSCQPEHYSPVCGSDGLMYFSLC HAGCPAATETNVDGQKVYRDCSCIPQNLSSGFGHATAGKCTSTCQRKPLLLVFIFVVIFF TFLSSIPALTATLRCVRDPQRSFALGIQWIVVRILGGIPGPIAFGWVIDKACLLWQDQCG QQGSCLVYQNSAMSRYILIMGLLYK corresponding to amino acids 1-675 of S21 C_HUMAN (SEQ ID NO:1062), which also corresponds to amino acids 1-675 of T23657_P12 (SEQ ID NO:1074), and a second amino acid sequence being at least 70%, optionally at least 80%, preferably at least 85%, more preferably at least 90% and most preferably at least 95% homologous to a polypeptide having the sequence EEENEFRRL (SEQ ID NO:1461) corresponding to amino acids 676-684 of T23657_P12 (SEQ ID NO:1074), wherein said first amino acid sequence and second amino acid sequence are contiguous and in a sequential order.

[3318] 2. An isolated polypeptide encoding for a tail of T23657_P12 (SEQ ID NO:1074), comprising a polypeptide being at least 70%, optionally at least about 80%, preferably at least about 85%, more preferably at least about 90% and most preferably at least about 95% homologous to the sequence EEENEFRRL (SEQ ID NO:1461) in T23657_P12 (SEQ ID NO:1074).

[3319] The location of the variant protein was determined according to results from a number of different software programs and analyses, including analyses from SignalP and other specialized programs. The variant protein is believed to be located as follows with regard to the cell: membrane. The protein localization is believed to be membrane because both trans-membrane region prediction programs predicted a trans-membrane region for this protein.

[3320] Variant protein T23657_P12 (SEQ ID NO:1074) also has the following non-silent SNPs (Single Nucleotide Polymorphisms) as listed in Table 50, (given according to their position(s) on the amino acid sequence, with the alternative amino acid(s) listed; the last column indicates whether the SNP is known or not; the presence of known SNPs in variant protein T23657_P12 (SEQ ID NO:1074) sequence provides support for the deduced sequence of this variant protein according to the present invention).

[3321] The glycosylation sites of variant protein T23657_P12 (SEQ ID NO:1074), as compared to the known protein Solute carrier family 21 member 12 (SEQ ID NO:1062), are described in Table 51 (given according to their position(s) on the amino acid sequence in the first column; the second column indicates whether the glycosylation site is present in the variant protein; and the last column indicates whether the position is different on the variant protein).

[3322] Variant protein T23657_P12 (SEQ ID NO:1074) is encoded by the following transcript(s): T23657_T24 (SEQ ID NO:1021), for which the sequence(s) is/are given at the end of the application. The coding portion of transcript T23657_T24 (SEQ ID NO:1021) is shown in bold; this coding portion starts at position 212 and ends at position 2263. The transcript also has the following SNPs as listed in Table 52 (given according to their position on the nucleotide sequence, with the alternative nucleic acid listed; the last column indicates whether the SNP is known or not; the presence of known SNPs in variant protein T23657_P12 (SEQ ID NO:1074) sequence provides support for the deduced sequence of this variant protein according to the present invention).

[3323] Variant protein T23657_P16 (SEQ ID NO:1075) according to the present invention has an amino acid sequence as given at the end of the application; it is encoded by transcript(s) T23657_T30 (SEQ ID NO:1023). An alignment is given to the known protein (Solute carrier family 21 member 12 (SEQ ID NO:1062)) at the end of the application. One or more alignments to one or more previously published protein sequences are given at the end of the application. A brief description of the relationship of the variant protein according to the present invention to each such aligned protein is as follows:

[3324] Comparison report between T23657_P16 (SEQ ID NO:1075) and S21C_HUMAN (SEQ ID NO:1062):

[3325] 1. An isolated chimeric polypeptide encoding for T23657_P16 (SEQ ID NO:1075), comprising a first amino acid sequence being at least 70%, optionally at least 80%, preferably at least 85%, more preferably at least 90% and most preferably at least 95% homologous to a polypeptide having the sequence MGTSPMADPVPAGRQHGSGLDPTTRLSPLC corresponding to amino acids 1-30 of T23657_P16 (SEQ ID NO:1075), and a second amino acid sequence being at least 90% homologous to SLLPEGHLNLTAPCNAACSCQPEHYSPVCGSDGLMYFSLCHAGCPAATETNVDGQKVY RDCSCIPQNLSSGFGHATAGKCTSTCQRKPLLLVFIFVVIFFTFLSSIPALTATLRCVRDPQ RSFALGIQWIVVRILGGIPGPIAFGWVIDKACLLWQDQCGQQGSCLVYQNSAMSRYILI MGLLYKVLGVLFFAIACFLYKPLSESSDGLETCLPSQSSAPDSATDSQLQSSV corresponding to amino acids 491-722 of S21C_HUMAN (SEQ ID NO:1062), which also corresponds to amino acids 31-262 of T23657_P16 (SEQ ID NO:1075), wherein said first amino acid sequence and second amino acid sequence are contiguous and in a sequential order.

[3326] 2. An isolated polypeptide encoding for a head of T23657_P16 (SEQ ID NO:1075), comprising a polypeptide being at least 70%, optionally at least about 80%, preferably at least about 85%, more preferably at least about 90% and most preferably at least about 95% homologous to the sequence MGTSPMADPVPAGRQHGSGLDPTTRLSPLC of T23657_P16 (SEQ ID NO:1075).

[3327] The location of the variant protein was determined according to results from a number of different software programs and analyses, including analyses from SignalP and other specialized programs. The variant protein is believed to be located as follows with regard to the cell: membrane. The protein localization is believed to be membrane because both trans-membrane region prediction programs predicted a trans-membrane region for this protein.

[3328] Variant protein T23657_P16 (SEQ ID NO:1075) also has the following non-silent SNPs (Single Nucleotide Polymorphisms) as listed in Table 53, (given according to their position(s) on the amino acid sequence, with the alternative amino acid(s) listed; the last column indicates whether the SNP is known or not; the presence of known SNPs in variant protein T23657_P16 (SEQ ID NO:1075) sequence provides support for the deduced sequence of this variant protein according to the present invention).

[3329] The glycosylation sites of variant protein T23657_P16 (SEQ ID NO:1075), as compared to the known protein Solute carrier family 21 member 12 (SEQ ID NO:1062), are described in Table 54 (given according to their position(s) on the amino acid sequence in the first column; the second column indicates whether the glycosylation site is present in the variant protein; and the last column indicates whether the position is different on the variant protein).

[3330] Variant protein T23657_P16 (SEQ ID NO:1075) is encoded by the following transcript(s): T23657_T30 (SEQ ID NO:1023), for which the sequence(s) is/are given at the end of the application. The coding portion of transcript T23657_T30 (SEQ ID NO:1023) is shown in bold; this coding portion starts at position 184 and ends at position 969. The transcript also has the following SNPs as listed in Table 55 (given according to their position on the nucleotide sequence, with the alternative nucleic acid listed; the last column indicates whether the SNP is known or not; the presence of known SNPs in variant protein T23657_P16 (SEQ ID NO:1075) sequence provides support for the deduced sequence of this variant protein according to the present invention).

[3331] Variant protein T23657_P17 (SEQ ID NO:1076) according to the present invention has an amino acid sequence as given at the end of the application; it is encoded by transcript(s) T23657_T31 (SEQ ID NO:1024) and T23657_T32 (SEQ ID NO:1025). An alignment is given to the known protein (Solute carrier family 21 member 12 (SEQ ID NO:1062)) at the end of the application. One or more alignments to one or more previously published protein sequences are given at the end of the application. A brief description of the relationship of the variant protein according to the present invention to each such aligned protein is as follows:

[3332] Comparison report between T23657_P17 (SEQ ID NO:1076) and S21C_HUMAN (SEQ ID NO:1062):

[3333] 1. An isolated chimeric polypeptide encoding for T23657_P17 (SEQ ID NO:1076), comprising a first amino acid sequence being at least 90% homologous to MYFSLCHAGCPAATETNVDGQKVYRDCSCIPQNLSSGFGHATAGKCTSTCQRKPLLLV FIFVVIFFTFLSSIPALTATLRCVRDPQRSFALGIQWIVVRILGGIPGPIAFGWVIDKACLL WQDQCGQQGSCLVYQNSAMSRYILIMGLLYKVLGVLFFAIACFLYKPLSESSDGLETCL PSQSSAPDSATDSQLQSSV corresponding to amino acids 525-722 of S21C_HUMAN (SEQ ID NO:1062), which also corresponds to amino acids 1-198 of T23657_P17 (SEQ ID NO:1076).

[3334] The location of the variant protein was determined according to results from a number of different software programs and analyses, including analyses from SignalP and other specialized programs. The variant protein is believed to be located as follows with regard to the cell: membrane. The protein localization is believed to be membrane because both trans-membrane region prediction programs predicted a trans-membrane region for this protein.

[3335] The glycosylation sites of variant protein T23657_P17 (SEQ ID NO:1076), as compared to the known protein Solute carrier family 21 member 12 (SEQ ID NO:1062), are described in Table 56 (given according to their position(s) on the amino acid sequence in the first column; the second column indicates whether the glycosylation site is present in the variant protein; and the last column indicates whether the position is different on the variant protein).

[3336] Variant protein T23657_P17 (SEQ ID NO:1076) is encoded by the following transcript(s): T23657_T31 (SEQ ID NO:1024) and T23657_T32 (SEQ ID NO:1025), for which the sequence(s) is/are given at the end of the application.

[3337] The coding portion of transcript T23657_T31 (SEQ ID NO:1024) is shown in bold; this coding portion starts at position 216 and ends at position 809. The transcript also has the following SNPs as listed in Table 57 (given according to their position on the nucleotide sequence, with the alternative nucleic acid listed; the last column indicates whether the SNP is known or not; the presence of known SNPs in variant protein T23657_P17 (SEQ ID NO:1076) sequence provides support for the deduced sequence of this variant protein according to the present invention).

[3338] The coding portion of transcript T23657_T32 (SEQ ID NO:1025) is shown in bold; this coding portion starts at position 174 and ends at position 767. The transcript also has the following SNPs as listed in Table 58 (given according to their position on the nucleotide sequence, with the alternative nucleic acid listed; the last column indicates whether the SNP is known or not; the presence of known SNPs in variant protein T23657_P17 (SEQ ID NO:1076) sequence provides support for the deduced sequence of this variant protein according to the present invention).

[3339] Variant protein T23657_P19 (SEQ ID NO:1077) according to the present invention has an amino acid sequence as given at the end of the application; it is encoded by transcript(s) T23657_T35 (SEQ ID NO:1026). The location of the variant protein was determined according to results from a number of different software programs and analyses, including analyses from SignalP and other specialized programs. The variant protein is believed to be located as follows with regard to the cell: intracellularly. The protein localization is believed to be intracellularly because neither of the trans-membrane region prediction programs predicted a trans-membrane region for this protein. In addition both signal-peptide prediction programs predict that this protein is a non-secreted protein.

[3340] Variant protein T23657_P19 (SEQ ID NO:1077) also has the following non-silent SNPs (Single Nucleotide Polymorphisms) as listed in Table 59, (given according to their position(s) on the amino acid sequence, with the alternative amino acid(s) listed; the last column indicates whether the SNP is known or not; the presence of known SNPs in variant protein T23657_P19 (SEQ ID NO:1077) sequence provides support for the deduced sequence of this variant protein according to the present invention).

[3341] Variant protein T23657_P19 (SEQ ID NO:1077) is encoded by the following transcript(s): T23657_T35 (SEQ ID NO:1026), for which the sequence(s) is/are given at the end of the application. The coding portion of transcript T23657_T35 (SEQ ID NO:1026) is shown in bold; this coding portion starts at position 184 and ends at position 663. The transcript also has the following SNPs as listed in Table 60 (given according to their position on the nucleotide sequence, with the alternative nucleic acid listed; the last column indicates whether the SNP is known or not; the presence of known SNPs in variant protein T23657_P19 (SEQ ID NO:1077) sequence provides support for the deduced sequence of this variant protein according to the present invention).

[3342] Variant protein T23657_P21 (SEQ ID NO:1078) according to the present invention has an amino acid sequence as given at the end of the application; it is encoded by transcript(s) T23657_T37 (SEQ ID NO:1027). An alignment is given to the known protein (Solute carrier family 21 member 12 (SEQ ID NO:1062)) at the end of the application. One or more alignments to one or more previously published protein sequences are given at the end of the application. A brief description of the relationship of the variant protein according to the present invention to each such aligned protein is as follows:

[3343] Comparison report between T23657_P21 (SEQ ID NO:1078) and S21C_HUMAN:

[3344] 1. An isolated chimeric polypeptide encoding for T23657_P21 (SEQ ID NO:1078), comprising a first amino acid sequence being at least 70%, optionally at least 80%, preferably at least 85%, more preferably at least 90% and most preferably at least 95% homologous to a polypeptide having the sequence MWTAR corresponding to amino acids 1-5 of T23657_P21 (SEQ ID NO:1078), and a second amino acid sequence being at least 90% homologous to RCVRDPQRSFALGIQWIVVRILGGIPGPIAFGWVIDKACLLWQDQCGQQGSCLVYQNSA MSRYILIMGLLYKVLGVLFFAIACFLYKPLSESSDGLETCLPSQSSAPDSATDSQLQSSV corresponding to amino acids 604-722 of S21 C_HUMAN (SEQ ID NO:1062), which also corresponds to amino acids 6-124 of T23657_P21 (SEQ ID NO:1078), wherein said first amino acid sequence and second amino acid sequence are contiguous and in a sequential order.

[3345] 2. An isolated polypeptide encoding for a head of T23657_P21 (SEQ ID NO:1078), comprising a polypeptide being at least 70%, optionally at least about 80%, preferably at least about 85%, more preferably at least about 90% and most preferably at least about 95% homologous to the sequence MWTAR of T23657_P21 (SEQ ID NO:1078).

[3346] The location of the variant protein was determined according to results from a number of different software programs and analyses, including analyses from SignalP and other specialized programs. The variant protein is believed to be located as follows with regard to the cell: membrane. The protein localization is believed to be membrane because although one of the signal-peptide prediction programs predicts that this protein has a signal peptide (HMM: Signal peptide/NN: NO), both trans-membrane region prediction programs predict that this protein has a trans-membrane region downstream of this signal peptide.

[3347] The glycosylation sites of variant protein T23657_P21 (SEQ ID NO:1078), as compared to the known protein Solute carrier family 21 member 12 (SEQ ID NO:1062), are described in Table 61 (given according to their position(s) on the amino acid sequence in the first column; the second column indicates whether the glycosylation site is present in the variant protein; and the last column indicates whether the position is different on the variant protein).

[3348] Variant protein T23657_P21 (SEQ ID NO:1078) is encoded by the following transcript(s): T23657_T37 (SEQ ID NO:1027), for which the sequence(s) is/are given at the end of the application. The coding portion of transcript T23657_T37 (SEQ ID NO:1027) is shown in bold; this coding portion starts at position 223 and ends at position 594. The transcript also has the following SNPs as listed in Table 62 (given according to their position on the nucleotide sequence, with the alternative nucleic acid listed; the last column indicates whether the SNP is known or not; the presence of known SNPs in variant protein T23657_P21 (SEQ ID NO:1078) sequence provides support for the deduced sequence of this variant protein according to the present invention).

[3349] Variant protein T23657_P22 (SEQ ID NO:1079) according to the present invention has an amino acid sequence as given at the end of the application; it is encoded by transcript(s) T23657_T38 (SEQ ID NO:1028). The location of the variant protein was determined according to results from a number of different software programs and analyses, including analyses from SignalP and other specialized programs. The variant protein is believed to be located as follows with regard to the cell: unknown.

[3350] Variant protein T23657_P22 (SEQ ID NO:1079) also has the following non-silent SNPs (Single Nucleotide Polymorphisms) as listed in Table 63, (given according to their position(s) on the amino acid sequence, with the alternative amino acid(s) listed; the last column indicates whether the SNP is known or not; the presence of known SNPs in variant protein T23657_P22 (SEQ ID NO:1079) sequence provides support for the deduced sequence of this variant protein according to the present invention).

[3351] Variant protein T23657_P22 (SEQ ID NO:1079) is encoded by the following transcript(s): T23657_T38 (SEQ ID NO:1028), for which the sequence(s) is/are given at the end of the application. The coding portion of transcript T23657_T38 (SEQ ID NO:1028) is shown in bold; this coding portion starts at position 55 and ends at position 88889. The transcript also has the following SNPs as listed in Table 64 (given according to their position on the nucleotide sequence, with the alternative nucleic acid listed; the last column indicates whether the SNP is known or not; the presence of known SNPs in variant protein T23657_P22 (SEQ ID NO:1079) sequence provides support for the deduced sequence of this variant protein according to the present invention).

[3352] Variant protein T23657_P23 (SEQ ID NO:1080) according to the present invention has an amino acid sequence as given at the end of the application; it is encoded by transcript(s) T23657_T11 (SEQ ID NO:1009). An alignment is given to the known protein (Solute carrier family 21 member 12 (SEQ ID NO:1062)) at the end of the application. One or more alignments to one or more previously published protein sequences are given at the end of the application. A brief description of the relationship of the variant protein according to the present invention to each such aligned protein is as follows:

[3353] Comparison report between T23657_P23 (SEQ ID NO:1080) and S21C_HUMAN (SEQ ID NO:1062):

[3354] 1. An isolated chimeric polypeptide encoding for T23657_P23 (SEQ ID NO:1080), comprising a first amino acid sequence being at least 90% homologous to MPLHQLGDKPLTFPSPNSAMENGLDHTPPSRRASPGTPLSPGSLRSAAHSPLDTSKQPLC QLWAEKHGARGTHEVRYVSAGQSVACGWWAFAPPCLQVLNTPKGILFFLCAAAFLQG MTVNGFINTVITSLERRYDLHSYQSGLIASSYDIAACLCLTFVSYFGGSGHKPRWLGWG VLLMGTGSLVFALPHFTAGRYEVELDAGVRTCPANPGAVCADSTSGLSRYQLVFMLG QFLHGVGATPLYTLGVTYLDENVKSSCSPVYIAIFYTAAILGPAAGYLIGGALLNIYTEM GRRTELTTESPLWVGAWWVGFLGSGAAAFFTAVPILGYPRQLPGSQRYAVMRAAEMH QLKDSSRGEASNPDFGKTIRDLPLSIWLLLKNPTFILLCLAGATEATLITGMSTFSPKFLES QFSLSASEAATLFGYLVVPAGGGGTFLGGFFVNKLRLRGSAVIKFCLFCTVVSLLGILVF SLHCPSVPMAGVTASYGGSLLPEGHLNLTAPCNAACSCQPEHYSPVCGSDGLMYFSLC HAGCPAATETNVDGQKV corresponding to amino acids 1-547 of S21 C_HUMAN (SEQ ID NO:1062), which also corresponds to amino acids 1-547 of T23657_P23 (SEQ ID NO:1080), and a second amino acid sequence being at least 70%, optionally at least 80%, preferably at least 85%, more preferably at least 90% and most preferably at least 95% homologous to a polypeptide having the sequence SGAAAYRPCPPLDPGKGPPCLPLVIGAIVGLPRCTETVAVSLRIFPLVLAMHCREMHFNL SEKAPPSGFHIRCNFLYIPQQHSCTNGNSTVSWGRVCACPELSLQHPEAELCRS (SEQ ID NO:1464) corresponding to amino acids 548-661 of T23657_P23 (SEQ ID NO:1080), wherein said first amino acid sequence and second amino acid sequence are contiguous and in a sequential order.

[3355] 2. An isolated polypeptide encoding for a tail of T23657_P23 (SEQ ID NO:1080), comprising a polypeptide being at least 70%, optionally at least about 80%, preferably at least about 85%, more preferably at least about 90% and most preferably at least about 95% homologous to the sequence SGAAAYRPCPPLDPGKGPPCLPLVIGAIVGLPRCTETVAVSLRIFPLVLAMHCREMHFNL SEKAPPSGFHIRCNFLYIPQQHSCTNGNSTVSWGRVCACPELSLQHPEAELCRS (SEQ ID NO:1464) in T23657_P23 (SEQ ID NO:1080).

[3356] The location of the variant protein was determined according to results from a number of different software programs and analyses, including analyses from SignalP and other specialized programs. The variant protein is believed to be located as follows with regard to the cell: membrane. The protein localization is believed to be membrane because both trans-membrane region prediction programs predicted a trans-membrane region for this protein.

[3357] Variant protein T23657_P23 (SEQ ID NO:1080) also has the following non-silent SNPs (Single Nucleotide Polymorphisms) as listed in Table 65, (given according to their position(s) on the amino acid sequence, with the alternative amino acid(s) listed; the last column indicates whether the SNP is known or not; the presence of known SNPs in variant protein T23657_P23 (SEQ ID NO:1080) sequence provides support for the deduced sequence of this variant protein according to the present invention).

[3358] The glycosylation sites of variant protein T23657_P23 (SEQ ID NO:1080), as compared to the known protein Solute carrier family 21 member 12 (SEQ ID NO:1062), are described in Table 66 (given according to their position(s) on the amino acid sequence in the first column; the second column indicates whether the glycosylation site is present in the variant protein; and the last column indicates whether the position is different on the variant protein).

[3359] Variant protein T23657_P23 (SEQ ID NO:1080) is encoded by the following transcript(s): T23657_T11 (SEQ ID NO:1009), for which the sequence(s) is/are given at the end of the application. The coding portion of transcript T23657_T11 (SEQ ID NO:1009) is shown in bold; this coding portion starts at position 212 and ends at position 2195. The transcript also has the following SNPs as listed in Table 67 (given according to their position on the nucleotide sequence, with the alternative nucleic acid listed; the last column indicates whether the SNP is known or not; the presence of known SNPs in variant protein T23657_P23 (SEQ ID NO:1080) sequence provides support for the deduced sequence of this variant protein according to the present invention).

[3360] As noted above, cluster T23657 features 33 segment(s), which were listed in Table 2 above and for which the sequence(s) are given at the end of the application. These segment(s) are portions of nucleic acid sequence(s) which are described herein separately because they are of particular interest. A description of each segment according to the present invention is now provided.

[3361] Segment cluster T23657_node_{—}2 (SEQ ID NO:1029) according to the present invention is supported by 30 libraries. The number of libraries was determined as previously described. This segment can be found in the following transcript(s): T23657_T0 (SEQ ID NO:998), T23657_T1 (SEQ ID NO:999), T23657_T2 (SEQ ID NO:1000), T23657_T3 (SEQ ID NO:1001), T23657_T4 (SEQ ID NO:1002), T23657_T5 (SEQ ID NO:1003), T23657_T6 (SEQ ID NO:1004), T23657_T7 (SEQ ID NO:1005), T23657_T8 (SEQ ID NO:1006), T23657_T9 (SEQ ID NO:1007), T23657_T10 (SEQ ID NO:1008), T23657_T11 (SEQ ID NO:1009), T23657_T12(SEQ ID NO:1010), T23657_T13(SEQ ID NO:1011), T23657_T14 (SEQ ID NO:1012), T23657_T11 (SEQ ID NO:1013), T23657_T16 (SEQ ID NO:1014), T23657_T17 (SEQ ID NO:1015), T23657_T19 (SEQ ID NO:1016), T23657_T20 (SEQ ID NO:1017), T23657_T21 (SEQ ID NO:1018), T23657_T22 (SEQ ID NO:1019), T23657 T23 (SEQ ID NO:1020), T23657_T24 (SEQ ID NO:1021) and T23657_T28 (SEQ ID NO:1022). Table 68 below describes the starting and ending position of this segment on each transcript.

[3362] Segment cluster T23657_node_{—}3 (SEQ ID NO:1030) according to the present invention is supported by 54 libraries. The number of libraries was determined as previously described. This segment can be found in the following transcript(s): T23657_T0 (SEQ ID NO:998), T23657_T1 (SEQ ID NO:999), T23657_T2 (SEQ ID NO:1000), T23657_T3 (SEQ ID NO:1001), T23657_T4 (SEQ ID NO:1002), T23657_T5 (SEQ ID NO:1003), T23657_T6 (SEQ ID NO:1004), T23657_T7 (SEQ ID NO:1005), T23657_T8 (SEQ ID NO:1006), T23657_T9 (SEQ ID NO:1007), T23657_T10 (SEQ ID NO:1008), T23657_T11 (SEQ ID NO:1009), T23657_T12 (SEQ ID NO:1010), T23657_T13 (SEQ ID NO:1011), T23657 T14 (SEQ ID NO:1012), T23657_T11 (SEQ ID NO:1013), T23657_T16 (SEQ ID NO:1014), T23657_T17 (SEQ ID NO:1015), T23657_T19 (SEQ ID NO:1016), T23657_T20 (SEQ ID NO:1017), T23657_T21 (SEQ ID NO:1018), T23657_T22 (SEQ ID NO:1019), T23657_T23 (SEQ ID NO:1020), T23657_T24 (SEQ ID NO:1021) and T23657_T28 (SEQ ID NO:1022). Table 69 below describes the starting and ending position of this segment on each transcript.

[3363] Segment cluster T23657_node_{—}8 (SEQ ID NO:1031) according to the present invention is supported by 25 libraries. The number of libraries was determined as previously described. This segment can be found in the following transcript(s): T23657_T0 (SEQ ID NO:998), T23657_T1 (SEQ ID NO:999), T23657_T2 (SEQ ID NO:1000), T23657_T3 (SEQ ID NO:1001), T23657_T4 (SEQ ID NO:1002), T23657_T5 (SEQ ID NO:1003), T23657_T6 (SEQ ID NO:1004), T23657_T7 (SEQ ID NO:1005), T23657_T8 (SEQ ID NO:1006), T23657_T9 (SEQ ID NO:1007), T23657_T10 (SEQ ID NO:1008), T23657_T11 (SEQ ID NO:1009), T23657_T12 (SEQ ID NO:1010), T23657_T13 (SEQ ID NO:1011) T23657_T14 (SEQ ID NO:1012), T23657_T15 (SEQ ID NO:1013), T23657_T16 (SEQ ID NO:1014), T23657_T17 (SEQ ID NO:1015), T23657_T19 (SEQ ID NO:1016), T23657_T20 (SEQ ID NO:1017, T23657_T21 (SEQ ID NO:1018), T23657_T22 (SEQ ID NO:1019), T23657_T23 (SEQ ID NO:1020), T23657_T24 (SEQ ID NO:1021) and T23657_T28 (SEQ ID NO:1022). Table 70 below describes the starting and ending position of this segment on each transcript.

[3364] Segment cluster T23657_node_{—}16 (SEQ ID NO:1032) according to the present invention is supported by 39 libraries. The number of libraries was determined as previously described. This segment can be found in the following transcript(s): T23657_T0 (SEQ ID NO:998), T23657_T1 (SEQ ID NO:999), T23657_T2 (SEQ ID NO:1000), T23657_T3 (SEQ ID NO:1001), T23657_T4 (SEQ ID NO:1002), T23657_T5 (SEQ ID NO:1003), T23657_T6 (SEQ ID NO:1004), T23657_T7 (SEQ ID NO:1005), T23657_T8 (SEQ ID NO:1006), T23657_T9 (SEQ ID NO:1007), T23657_T10 (SEQ ID NO:1008), T23657_T11 (SEQ ID NO:1009), T23657_T12(SEQ ID NO:1010), T23657_T13(SEQ ID NO:1011), T23657_T14 (SEQ ID NO:1012), T23657_T15 (SEQ ID NO:1013), T23657_T16 (SEQ ID NO:1014), T23657_T17 (SEQ ID NO:1015), T23657_T19 (SEQ ID NO:1016), T23657_T20 (SEQ ID NO:1017), T23657_T21 (SEQ ID NO:1018), T23657_T22 (SEQ ID NO:1019), T23657 T23 (SEQ ID NO:1020), T23657_T24 (SEQ ID NO:1021) and T23657_T28 (SEQ ID NO:1022). Table 71 below describes the starting and ending position of this segment on each transcript.

[3365] Segment cluster T23657_node_{—}18 (SEQ ID NO:1033) according to the present invention is supported by 40 libraries. The number of libraries was determined as previously described. This segment can be found in the following transcript(s): T23657_T0 (SEQ ID NO:998), T23657_T1 (SEQ ID NO:999), T23657_T2 (SEQ ID NO:1000), T23657_T3 (SEQ ID NO:1001), T23657_T4 (SEQ ID NO:1002), T23657_T5 (SEQ ID NO:1003), T23657_T6 (SEQ ID NO:1004), T23657_T7 (SEQ ID NO:1005), T23657_T8 (SEQ ID NO:1006), T23657_T9 (SEQ ID NO:1007), T23657_T10 (SEQ ID NO:1008), T23657_T11 (SEQ ID NO:1009), T23657_T12 (SEQ ID NO:1010), T23657_T13 (SEQ ID NO:1011), T23657_T14 (SEQ ID NO:1012), T23657_T15 (SEQ ID NO:1013), T23657_T16 (SEQ ID NO:1014), T23657_T17 (SEQ ID NO:1015), T23657_T19 (SEQ ID NO:1016), T23657_T20 (SEQ ID NO:1017), T23657_T21 (SEQ ID NO:1018), T23657_T22 (SEQ ID NO:1019), T23657_T24 (SEQ ID NO:1021) and T23657_T28 (SEQ ID NO:1022). Table 72 below describes the starting and ending position of this segment on each transcript.

[3366] Segment cluster T23657_node_{—}23 (SEQ ID NO:1034) according to the present invention is supported by 4 libraries. The number of libraries was determined as previously described. This segment can be found in the following transcript(s): T23657_T30 (SEQ ID NO:1023) and T23657_T35 (SEQ ID NO:1026). Table 73 below describes the starting and ending position of this segment on each transcript.

[3367] Segment cluster T23657_node_{—}24 (SEQ ID NO:1035) according to the present invention is supported by 42 libraries. The number of libraries was determined as previously described. This segment can be found in the following transcript(s): T23657_T0 (SEQ ID NO:998), T23657_T1 (SEQ ID NO:999), T23657_T2 (SEQ ID NO:1000), T23657_T3 (SEQ ID NO:1001), T23657_T4 (SEQ ID NO:1002), T23657_T5 (SEQ ID NO:1003), T23657_T6 (SEQ ID NO:1004), T23657_T7 (SEQ ID NO:1005), T23657_T8 (SEQ ID NO:1006), T23657_T9 (SEQ ID NO:1007), T23657_T10 (SEQ ID NO:1008), T23657_T11 (SEQ ID NO:1009), T23657_T12 (SEQ ID NO:1010), T23657_T13 (SEQ ID NO:1011), T23657 T14 (SEQ ID NO:1012), T23657_T11 (SEQ ID NO:1013), T23657_T16 (SEQ ID NO:1014), T23657_T17 (SEQ ID NO:1015), T23657_T19 (SEQ ID NO:1016), T23657_T20 (SEQ ID NO:1017), T23657_T21 (SEQ ID NO:1018), T23657_T22 (SEQ ID NO:1019), T23657_T23 (SEQ ID NO:1020), T23657_T24 (SEQ ID NO:1021), T23657_T28 (SEQ ID NO:1022), T23657_T30 (SEQ ID NO:1023), T23657_T31 (SEQ ID NO:1024), T23657_T32 (SEQ ID NO:1025), T23657_T35 (SEQ ID NO:1026) and T23657_T37 (SEQ ID NO:1027). Table 74 below describes the starting and ending position of this segment on each transcript.

[3368] Segment cluster T23657_node_{—}27 (SEQ ID NO:1036) according to the present invention is supported by 38 libraries. The number of libraries was determined as previously described. This segment can be found in the following transcript(s): T23657_T0 (SEQ ID NO:998), T23657_T1 (SEQ ID NO:999), T23657_T2 (SEQ ID NO:1000), T23657_T3 (SEQ ID NO:1001), T23657_T4 (SEQ ID NO:1002), T23657_T5 (SEQ ID NO:1003), T23657_T6 (SEQ ID NO:1004), T23657_T7 (SEQ ID NO:1005), T23657_T8 (SEQ ID NO:1006), T23657_T9 (SEQ ID NO:1007), T23657_T10 (SEQ ID NO:1008), T23657_T11 (SEQ ID NO:1009), T23657_T14 (SEQ ID NO:1012), T23657_T15 (SEQ ID NO:1013), T23657_T16 (SEQ ID NO:1014), T23657_T20 (SEQ ID NO:1017), T23657_T21 (SEQ ID NO:1018), T23657_T24 (SEQ ID NO:1021), T23657_T30 (SEQ ID NO:1023), T23657_T31 (SEQ ID NO:1024), T23657_T32 (SEQ ID NO:1025) and T23657_T35 (SEQ ID NO:1026). Table 75 below describes the starting and ending position of this segment on each transcript.

[3369] Segment cluster T23657_node_{—}29 (SEQ ID NO:1037) according to the present invention is supported by 12 libraries. The number of libraries was determined as previously described. This segment can be found in the following transcript(s): T23657_T5 (SEQ ID NO:1003), T23657_T6 (SEQ ID NO:1004), T23657_T10 (SEQ ID NO:1008), T23657_T11 (SEQ ID NO:1009) and T23657_T35 (SEQ ID NO:1026). Table 76 below describes the starting and ending position of this segment on each transcript.

[3370] Segment cluster T23657_node_{—}34 (SEQ ID NO:1038) according to the present invention is supported by 65 libraries. The number of libraries was determined as previously described. This segment can be found in the following transcript(s): T23657_T0 (SEQ ID NO:998), T23657_T1 (SEQ ID NO:999), T23657_T2 (SEQ ID NO:1000), T23657_T3 (SEQ ID NO:1001), T23657_T4 (SEQ ID NO:1002), T23657_T5 (SEQ ID NO:1003), T23657_T6 (SEQ ID NO:1004), T23657_T7 (SEQ ID NO:1005), T23657_T8 (SEQ ID NO:1006), T23657_T9 (SEQ ID NO:1007), T23657_T10 (SEQ ID NO:1008), T23657_T11 (SEQ ID NO:1009), T23657_T12 (SEQ ID NO:1010), T23657_T13 (SEQ ID NO:1011), T23657_T14 (SEQ ID NO:1012), T23657_T15 (SEQ ID NO:1013), T23657_T16 (SEQ ID NO:1014), T23657_T17 (SEQ ID NO:1015), T23657_T19 (SEQ ID NO:1016), T23657_T20 (SEQ ID NO:1017, T23657_T21 (SEQ ID NO:1018), T23657_T22 (SEQ ID NO:1019), T23657_T23 (SEQ ID NO:1020), T23657_T24 (SEQ ID NO:1021), T23657_T28 (SEQ ID NO:1022), T23657_T30 (SEQ ID NO:1023), T23657_T31 (SEQ ID NO:1024), T23657_T32 (SEQ ID NO:1025), T23657_T35 (SEQ ID NO:1026), T23657_T37 (SEQ ID NO:1027) and T23657_T38 (SEQ ID NO:1028). Table 77 below describes the starting and ending position of this segment on each transcript.

[3371] Segment cluster T23657_node_{—}37 (SEQ ID NO:1039) according to the present invention is supported by 2 libraries. The number of libraries was determined as previously described. This segment can be found in the following transcript(s): T23657_T3 (SEQ ID NO:1001), T23657_T4 (SEQ ID NO:1002), T23657_T6 (SEQ ID NO:1004), T23657_T9 (SEQ ID NO:1007), T23657_T13 (SEQ ID NO:1011) and T23657_T21 (SEQ ID NO:1018). Table 78 below describes the starting and ending position of this segment on each transcript.

[3372] Segment cluster T23657_node_{—}38 (SEQ ID NO:1040) according to the present invention is supported by 2 libraries. The number of libraries was determined as previously described. This segment can be found in the following transcript(s): T23657_T3 (SEQ ID NO:1001), T23657_T4 (SEQ ID NO:1002), T23657_T6 (SEQ ID NO:1004), T23657_T9 (SEQ ID NO:1007) and T23657_T13 (SEQ ID NO:1011). Table 79 below describes the starting and ending position of this segment on each transcript.

[3373] Segment cluster T23657_node_{—}39 (SEQ ID NO:1041) according to the present invention is supported by 13 libraries. The number of libraries was determined as previously described. This segment can be found in the following transcript(s): T23657_T2 (SEQ ID NO:1000), T23657_T3 (SEQ ID NO:1001), T23657_T4 (SEQ ID NO:1002), T23657_T5 (SEQ ID NO: 1003), T23657_T6 (SEQ ID NO:1004), T23657_T7 (SEQ ID NO:1005), T23657_T9 (SEQ ID NO:1007), T23657_T10 (SEQ ID NO:1008), T23657_T12 (SEQ ID NO:1010), T23657_T13 (SEQ ID NO:1011), T23657_T16 (SEQ ID NO:1014), T23657_T20 (SEQ ID NO:1017), T23657_T22 (SEQ ID NO:1019) and T23657_T35 (SEQ ID NO:1026). Table 80 below describes the starting and ending position of this segment on each transcript.

[3374] Segment cluster T23657_node_{—}40 (SEQ ID NO:1042) according to the present invention is supported by 40 libraries. The number of libraries was determined as previously described. This segment can be found in the following transcript(s): T23657_T2 (SEQ ID NO:1000), T23657_T3 (SEQ ID NO:1001), T23657_T4 (SEQ ID NO:1002), T23657_T5 (SEQ ID NO:1003), T23657_T6 (SEQ ID NO:1004), T23657_T7 (SEQ ID NO:1005), T23657_T9 (SEQ ID NO:1007), T23657_T10 (SEQ ID NO:1008), T23657_T12 (SEQ ID NO:1010), T23657_T13 (SEQ ID NO:1011), T23657_T16 (SEQ ID NO:1014) and T23657_T35 (SEQ ID NO:1026). Table 81 below describes the starting and ending position of this segment on each transcript.

[3375] Segment cluster T23657_node_{—}45 (SEQ ID NO:1043) according to the present invention is supported by 91 libraries. The number of libraries was determined as previously described. This segment can be found in the following transcript(s): T23657_T0 (SEQ ID NO:998), T23657_T1 (SEQ ID NO:999), T23657_T2 (SEQ ID NO:1000), T23657 T3 (SEQ ID NO:1001), T23657_T4 (SEQ ID NO:1002), T23657_T5 (SEQ ID NO:1003), T23657_T6 (SEQ ID NO:1004), T23657_T7 (SEQ ID NO:1005), T23657_T8 (SEQ ID NO:1006), T23657_T9 (SEQ ID NO:1007), T23657_T10 (SEQ ID NO:1008), T23657_T11 (SEQ ID NO:1009), T23657_T12 (SEQ ID NO:1010), T23657_T13 (SEQ ID NO:1011), T23657_T14 (SEQ ID NO:1012), T23657_T15 (SEQ ID NO:1013), T23657_T16 (SEQ ID NO:1014), T23657_T17 (SEQ ID NO:1015), T23657_T19 (SEQ ID NO:1016), T23657_T20 (SEQ ID NO:1017), T23657_T21 (SEQ ID NO:1018), T23657_T22 (SEQ ID NO:1019), T23657_T23 (SEQ ID NO:1020), T23657_T30 (SEQ ID NO:1023), T23657_T31 (SEQ ID NO:1024), T23657_T32 (SEQ ID NO:1025), T23657_T35 (SEQ ID NO:1026) and T23657_T37 (SEQ ID NO:1027). Table 82 below describes the starting and ending position of this segment on each transcript.

[3376] Segment cluster T23657_node_{—}46 (SEQ ID NO:1044) according to the present invention is supported by 7 libraries. The number of libraries was determined as previously described. This segment can be found in the following transcript(s): T23657_T1 (SEQ ID NO:999), T23657_T7 (SEQ ID NO:1005) and T23657_T38 (SEQ ID NO:1028). Table 83 below describes the starting and ending position of this segment on each transcript.

[3377] Segment cluster T23657_node_{—}49 (SEQ ID NO:1045) according to the present invention is supported by 5 libraries. The number of libraries was determined as previously described. This segment can be found in the following transcript(s): T23657_T24 (SEQ ID NO:1021) and T23657_T28 (SEQ ID NO:1022). Table 84 below describes the starting and ending position of this segment on each transcript.

[3378] According to an optional embodiment of the present invention, short segments related to the above cluster are also provided. These segments are up to about 120 bp in length, and so are included in a separate description.

[3379] Segment cluster T23657_node_{—}0 (SEQ ID NO:1046) according to the present invention is supported by 24 libraries. The number of libraries was determined as previously described. This segment can be found in the following transcript(s): T23657_T0 (SEQ ID NO:998), T23657_T1 (SEQ ID NO:999), T23657_T2 (SEQ ID NO:1000), T23657_T3 (SEQ ID NO:1001), T23657_T4 (SEQ ID NO:1002), T23657_T5 (SEQ ID NO:1003), T23657_T6 (SEQ ID NO:1004), T23657_T7 (SEQ ID NO:1005), T23657_T8 (SEQ ID NO:1006), T23657_T9 (SEQ ID NO:1007), T23657_T10 (SEQ ID NO:1008), T23657_T11 (SEQ ID NO:1009), T23657_T12 (SEQ ID NO:1010), T23657 T13 (SEQ ID NO:1011), T23657_T14 (SEQ ID NO:1012), T23657_T15 (SEQ ID NO:1013), T23657_T16 (SEQ ID NO:1014), T23657_T17 (SEQ ID NO:1015), T23657_T19 (SEQ ID NO:1016), T23657_T20 (SEQ ID NO:1017), T23657_T21 (SEQ ID NO:1018), T23657_T22 (SEQ ID NO:1019), T23657_T23 (SEQ ID NO:1020), T23657_T24 (SEQ ID NO:1021), T23657_T28 (SEQ ID NO:1022) and T23657_T31 (SEQ ID NO:1024). Table 85 below describes the starting and ending position of this segment on each transcript.

[3380] Segment cluster T23657_node_{—}4 (SEQ ID NO:1047) according to the present invention is supported by 31 libraries. The number of libraries was determined as previously described. This segment can be found in the following transcript(s): T23657_T0 (SEQ ID NO:998), T23657_T1 (SEQ ID NO:999), T23657_T2 (SEQ ID NO:1000), T23657_T3 (SEQ ID NO:1001), T23657_T4 (SEQ ID NO:1002), T23657_T5 (SEQ ID NO:1003), T23657_T6 (SEQ ID NO:1004), T23657_T7 (SEQ ID NO:1005), T23657_T8 (SEQ ID NO:1006), T23657_T9 (SEQ ID NO:1007), T23657_T10 (SEQ ID NO:1008), T23657_T11 (SEQ ID NO:1009), T23657_T12 (SEQ ID NO:1010), T23657_T13 (SEQ ID NO:1011), T23657_T14 (SEQ ID NO:1012), T23657_T15(SEQ ID NO:1013), T23657_T16(SEQ ID NO:1014), T23657_T17 (SEQ ID NO:1015), T23657_T19 (SEQ ID NO:1016), T23657_T20 (SEQ ID NO:1017), T23657_T21 (SEQ ID NO:1018), T23657_T22 (SEQ ID NO:1019), T23657_T23 (SEQ ID NO:1020), T23657_T24 (SEQ ID NO:1021) and T23657_T28 (SEQ ID NO:1022). Table 86 below describes the starting and ending position of this segment on each transcript.

[3381] Segment cluster T23657_node_{—}6 (SEQ ID NO:1048) according to the present invention is supported by 28 libraries. The number of libraries was determined as previously described. This segment can be found in the following transcript(s): T23657_T0 (SEQ ID NO:998), T23657_T1 (SEQ ID NO:999), T23657_T2 (SEQ ID NO:1000), T23657_T3 (SEQ ID NO:1001), T23657_T4 (SEQ ID NO:1002), T23657_T5 (SEQ ID NO:1003), T23657_T6 (SEQ ID NO:1004), T23657_T7 (SEQ ID NO:1005), T23657_T8 (SEQ ID NO:1006), T23657_T9 (SEQ ID NO:1007), T23657_T10 (SEQ ID NO:1008), T23657_T11 (SEQ ID NO:1009), T23657_T12 (SEQ ID NO:1010), T23657_T13 (SEQ ID NO:1011), T23657_T15 (SEQ ID NO:1013), T23657_T16 (SEQ ID NO:1014), T23657_T17 (SEQ ID NO:1015), T23657_T19 (SEQ ID NO:1016), T23657_T20 (SEQ ID NO:1017), T23657_T21 (SEQ ID NO:1018), T23657_T22 (SEQ ID NO:1019), T23657_T23 (SEQ ID NO:1020), T23657_T24 (SEQ ID NO:1021) and T23657_T28 (SEQ ID NO:1022). Table 87 below describes the starting and ending position of this segment on each transcript.

[3382] Segment cluster T23657_node_{—}11 (SEQ ID NO:1049) according to the present invention is supported by 33 libraries. The number of libraries was determined as previously described. This segment can be found in the following transcript(s): T23657_T0 (SEQ ID NO:998), T23657_T1 (SEQ ID NO:999), T23657_T2 (SEQ ID NO:1000), T23657_T3 (SEQ ID NO:1001), T23657_T4 (SEQ ID NO:1002), T23657_T5 (SEQ ID NO:1003), T23657_T6 (SEQ ID NO:1004), T23657_T7 (SEQ ID NO:1005), T23657_T8 (SEQ ID NO:1006), T23657_T9 (SEQ ID NO:1007), T23657_T10 (SEQ ID NO:1008), T23657_T11 (SEQ ID NO:1009), T23657_T12 (SEQ ID NO:1010), T23657_T13 (SEQ ID NO:1011), T23657_T14 (SEQ ID NO:1012), T23657_T15(SEQ ID NO:1013), T23657_T16(SEQ ID NO:1014), T23657_T17 (SEQ ID NO:1015), T23657_T19 (SEQ ID NO:1016), T23657_T20 (SEQ ID NO:1017), T23657_T21 (SEQ ID NO:1018), T23657_T22 (SEQ ID NO:1019), T23657_T23 (SEQ ID NO:1020), T23657_T24 (SEQ ID NO:1021) and T23657_T28 (SEQ ID NO:1022). Table 88 below describes the starting and ending position of this segment on each transcript.

[3383] Segment cluster T23657_node_{—}20 (SEQ ID NO:1050) according to the present invention is supported by 2 libraries. The number of libraries was determined as previously described. This segment can be found in the following transcript(s): T23657_T32 (SEQ ID NO:1025) and T23657_T37 (SEQ ID NO:1027). Table 89 below describes the starting and ending position of this segment on each transcript.

[3384] Segment cluster T23657_node_{—}22 (SEQ ID NO:1051) according to the present invention is supported by 3 libraries. The number of libraries was determined as previously described. This segment can be found in the following transcript(s): T23657_T30 (SEQ ID NO:1023), T23657_T35 (SEQ ID NO:1026) and T23657_T38 (SEQ ID NO:1028). Table 90 below describes the starting and ending position of this segment on each transcript.

[3385] Segment cluster T23657_node_{—}25 (SEQ ID NO:1052) according to the present invention is supported by 36 libraries. The number of libraries was determined as previously described. This segment can be found in the following transcript(s): T23657_T0 (SEQ ID NO:998), T23657_T1 (SEQ ID NO:999), T23657_T2 (SEQ ID NO:1000), T23657_T3 (SEQ ID NO:1001), T23657_T4 (SEQ ID NO:1002), T23657_T5 (SEQ ID NO:1003), T23657_T6 (SEQ ID NO:1004), T23657_T7 (SEQ ID NO:1005), T23657_T8 (SEQ ID NO:1006), T23657_T9 (SEQ ID NO:1007), T23657_T10 (SEQ ID NO:1008), T23657_T11 (SEQ ID NO:1009), T23657_T12 (SEQ ID NO:1010), T23657_T13 (SEQ ID NO:1011), T23657_T14 (SEQ ID NO:1012), T23657_T15 (SEQ ID NO:1013), T23657_T16 (SEQ ID NO:1014), T23657_T17 (SEQ ID NO:1015), T23657_T19 (SEQ ID NO:1016), T23657_T20 (SEQ ID NO:1017), T23657_T21 (SEQ ID NO:1018), T23657_T22 (SEQ ID NO:1019), T23657_T23 (SEQ ID NO:1020), T23657_T24 (SEQ ID NO:1021), T23657_T28 (SEQ ID NO:1022), T23657_T30 (SEQ ID NO:1023), T23657_T31 (SEQ ID NO:1024), T23657_T32 (SEQ ID NO:1025), T23657_T35 (SEQ ID NO:1026), T23657_T37 (SEQ ID NO:1027) and T23657_T38 (SEQ ID NO:1028). Table 91 below describes the starting and ending position of this segment on each transcript.

[3386] Segment cluster T23657_node_{—}26 (SEQ ID NO:1053) according to the present invention is supported by 8 libraries. The number of libraries was determined as previously described. This segment can be found in the following transcript(s): T23657_T10 (SEQ ID NO:1008), T23657_T11 (SEQ ID NO:1009) and T23657_T35 (SEQ ID NO:1026). Table 92 below describes the starting and ending position of this segment on each transcript.

[3387] Segment cluster T23657_node_{—}28 (SEQ ID NO:1054) according to the present invention is supported by 34 libraries. The number of libraries was determined as previously described. This segment can be found in the following transcript(s): T23657_T0 (SEQ ID NO:998), T23657_T1 (SEQ ID NO:999), T23657_T2 (SEQ ID NO:1000), T23657_T3 (SEQ ID NO:1001), T23657_T4 (SEQ ID NO:1002), T23657_T5 (SEQ ID NO:1003), T23657_T6 (SEQ ID NO:1004), T23657_T7 (SEQ ID NO:1005), T23657_T8 (SEQ ID NO:1006), T23657_T9 (SEQ ID NO:1007), T23657_T10 (SEQ ID NO:1008), T23657_T11 (SEQ ID NO:1009), T23657_T13 (SEQ ID NO:1011), T23657 T14 (SEQ ID NO:1012), T23657 T15 (SEQ ID NO:1013), T23657_T16(SEQ ID NO:1014), T23657_T19(SEQ ID NO:1016), T23657_T20 (SEQ ID NO:1017), T23657_T21 (SEQ ID NO:1018), T23657_T24 (SEQ ID NO:1021), T23657_T28 (SEQ ID NO:1022), T23657_T30 (SEQ ID NO:1023), T23657_T31 (SEQ ID NO:1024), T23657_T32 (SEQ ID NO:1025), T23657_T35 (SEQ ID NO:1026) and T23657_T38 (SEQ ID NO:1028). Table 93 below describes the starting and ending position of this segment on each transcript.

[3388] Segment cluster T23657_node_{—}30 (SEQ ID NO:1055) according to the present invention is supported by 7 libraries. The number of libraries was determined as previously described. This segment can be found in the following transcript(s): T23657_T5 (SEQ ID NO:1003), T23657_T6 (SEQ ID NO:1004), T23657_T10 (SEQ ID NO:1008), T23657_T11 (SEQ ID NO:1009) and T23657_T35 (SEQ ID NO:1026). Table 94 below describes the starting and ending position of this segment on each transcript.

[3389] Segment cluster T23657_node_{—}31 (SEQ ID NO:1056) according to the present invention is supported by 46 libraries. The number of libraries was determined as previously described. This segment can be found in the following transcript(s): T23657_T0 (SEQ ID NO:998), T23657_T1 (SEQ ID NO:999), T23657_T2 (SEQ ID NO:1000), T23657_T3 (SEQ ID NO:1001), T23657_T4 (SEQ ID NO:1002), T23657_T5 (SEQ ID NO:1003), T23657_T6 (SEQ ID NO:1004), T23657_T7 (SEQ ID NO:1005), T23657_T8 (SEQ ID NO:1006), T23657_T9 (SEQ ID NO:1007), T23657_T10 (SEQ ID NO:1008), T23657_T11 (SEQ ID NO:1009), T23657_T12(SEQ ID NO:1010), T23657_T13(SEQ ID NO:1011), T23657_T14 (SEQ ID NO:1012), T23657_T15 (SEQ ID NO:1013), T23657_T16 (SEQ ID NO:1014), T23657_T17 (SEQ ID NO:1015), T23657_T19 (SEQ ID NO:1016), T23657_T20 (SEQ ID NO:1017), T23657_T21 (SEQ ID NO:1018), T23657_T22 (SEQ ID NO:1019), T23657_T23 (SEQ ID NO:1020), T23657_T24 (SEQ ID NO:1021), T23657_T28 (SEQ ID NO:1022), T23657_T30 (SEQ ID NO:1023), T23657_T31 (SEQ ID NO:1024), T23657_T32 (SEQ ID NO:1025), T23657_T35 (SEQ ID NO:1026), T23657_T37 (SEQ ID NO:1027) and T23657_T38 (SEQ ID NO:1028). Table 95 below describes the starting and ending position of this segment on each transcript.

[3390] Segment cluster T23657_node_{—}32 (SEQ ID NO:1057) according to the present invention is supported by 5 libraries. The number of libraries was determined as previously described. This segment can be found in the following transcript(s): T23657_T4 (SEQ ID NO:1002), T23657_T6 (SEQ ID NO:1004) and T23657_T15 (SEQ ID NO:1013). Table 96 below describes the starting and ending position of this segment on each transcript.

[3391] Segment cluster T23657_node_{—}41 (SEQ ID NO:1058) according to the present invention is supported by 26 libraries. The number of libraries was determined as previously described. This segment can be found in the following transcript(s): T23657_T2 (SEQ ID NO:1000), T23657_T3 (SEQ ID NO:1001), T23657_T4 (SEQ ID NO:1002), T23657_T5 (SEQ ID NO:1003), T23657_T6 (SEQ ID NO:1004), T23657_T7 (SEQ ID NO:1005), T23657_T9 (SEQ ID NO:1007), T23657_T10 (SEQ ID NO:1008), T23657_T12 (SEQ ID NO:1010), T23657_T13 (SEQ ID NO:1011), T23657_T16 (SEQ ID NO:1014) and T23657_T35 (SEQ ID NO:1026). Table 97 below describes the starting and ending position of this segment on each transcript.

[3392] Segment cluster T23657_node_{—}42 (SEQ ID NO:1059) according to the present invention is supported by 71 libraries. The number of libraries was determined as previously described. This segment can be found in the following transcript(s): T23657_T0 (SEQ ID NO:998), T23657_T1 (SEQ ID NO:999), T23657_T2 (SEQ ID NO:1000), T23657_T3 (SEQ ID NO:1001), T23657_T4 (SEQ ID NO:1002), T23657_T5 (SEQ ID NO:1003), T23657_T6 (SEQ ID NO:1004), T23657_T7 (SEQ ID NO:1005), T23657_T8 (SEQ ID NO:1006), T23657 T9 (SEQ ID NO:1007), T23657 T10 (SEQ ID NO:1008), T23657_T11 (SEQ ID NO:1009), T23657_T12 (SEQ ID NO:1010), T23657_T13 (SEQ ID NO:1011), T23657_T14 (SEQ ID NO:1012), T23657_T15 (SEQ ID NO:1013), T23657_T17 (SEQ ID NO: 1015), T23657_T19 (SEQ ID NO:1016), T23657_T20 (SEQ ID NO:1017), T23657_T21 (SEQ ID NO:1018), T23657_T22 (SEQ ID NO:1019), T23657_T23 (SEQ ID NO:1020), T23657_T30 (SEQ ID NO:1023), T23657_T31 (SEQ ID NO:1024), T23657_T32 (SEQ ID NO:1025), T23657_T35 (SEQ ID NO:1026) and T23657_T37 (SEQ ID NO:1027). Table 98 below describes the starting and ending position of this segment on each transcript.

[3393] Segment cluster T23657_node_{—}43 (SEQ ID NO:1060) according to the present invention is supported by 80 libraries. The number of libraries was determined as previously described. This segment can be found in the following transcript(s): T23657_T0 (SEQ ID NO:998), T23657_T1 (SEQ ID NO:999), T23657_T2 (SEQ ID NO:1000), T23657_T3 (SEQ ID NO:1001), T23657_T4 (SEQ ID NO:1002), T23657_T5 (SEQ ID NO:1003), T23657_T6 (SEQ ID NO:1004), T23657_T7 (SEQ ID NO:1005), T23657_T8 (SEQ ID NO:1006), T23657_T9 (SEQ ID NO:1007), T23657_T10 (SEQ ID NO:1008), T23657_T11 (SEQ ID NO:1009), T23657_T12 (SEQ ID NO:1010), T23657_T13 (SEQ ID NO:1011), T23657_T14 (SEQ ID NO:1012), T23657_T15 (SEQ ID NO:1013), T23657 T17 (SEQ ID NO:1015), T23657_T19 (SEQ ID NO:1016), T23657_T20 (SEQ ID NO:1017), T23657_T21 (SEQ ID NO:1018), T23657_T22 (SEQ ID NO:1019), T23657_T23 (SEQ ID NO:1020), T23657_T30 (SEQ ID NO:1023), T23657_T31 (SEQ ID NO:1024), T23657_T32 (SEQ ID NO:1025), T23657_T35 (SEQ ID NO:1026) and T23657_T37 (SEQ ID NO:1027). Table 99 below describes the starting and ending position of this segment on each transcript.

[3394] Segment cluster T23657_node_{—}44 (SEQ ID NO:1061) according to the present invention is supported by 79 libraries. The number of libraries was determined as previously described. This segment can be found in the following transcript(s): T23657_T0 (SEQ ID NO:998), T23657_T1 (SEQ ID NO:999), T23657_T2 (SEQ ID NO:1000), T23657_T3 (SEQ ID NO:1001), T23657_T4 (SEQ ID NO:1002), T23657_T5 (SEQ ID NO:1003), T23657_T6 (SEQ ID NO:1004), T23657_T7 (SEQ ID NO:1005), T23657_T8 (SEQ ID NO:1006), T23657_T9 (SEQ ID NO:1007), T23657_T10 (SEQ ID NO:1008), T23657_T11 (SEQ ID NO:1009), T23657_T12 (SEQ ID NO:1010), T23657_T13 (SEQ ID NO:1011), T23657_T14 (SEQ ID NO:1012), T23657_T15 (SEQ ID NO:1013), T23657_T16 (SEQ ID NO:1014), T23657_T17 (SEQ ID NO:1015), T23657_T19 (SEQ ID NO:1016), T23657_T20 (SEQ ID NO:1017), T23657_T21 (SEQ ID NO:1018), T23657_T22 (SEQ ID NO:1019), T23657_T23 (SEQ ID NO:1020), T23657_T30 (SEQ ID NO:1023), T23657_T31 (SEQ ID NO:1024), T23657_T32 (SEQ ID NO:1025), T23657_T35 (SEQ ID NO:1026) and T23657_T37 (SEQ ID NO:1027). Table 100 below describes the starting and ending position of this segment on each transcript.

Variant protein alignment to the previously known protein:

Sequence name: S21C_HUMAN (SEQ ID NO:1062)

Sequence Documentation:

Alignment of: T23657_P2 (SEQ ID NO:1064)×S21C_HUMAN (SEQ ID NO:1062) ••

Alignment segment 1/1:

Alignment:

Sequence name: S21C_HUMAN (SEQ ID NO:1062)

Sequence Documentation:

Alignment of: T23657_P3 (SEQ ID NO:1065)×S21C_HUMAN (SEQ ID NO:1062) ••

Alignment segment 1/1:

Alignment:

Sequence name: S21C_HUMAN (SEQ ID NO:1062)

Sequence Documentation:

Alignment of: T23657_P4 (SEQ ID NO:1066)×S21C_HUMAN (SEQ ID NO:1062) ••

Alignment segment 1/1:

Alignment:

Sequence name: S21C_HUMAN (SEQ ID NO:1062)

Sequence Documentation:

Alignment of: T23657_P5 (SEQ ID NO:1067)×S21C_HUMAN (SEQ ID NO:1062) ••

Alignment segment 1/1:

Alignment:

Sequence name: S21C_HUMAN (SEQ ID NO:1062)

Sequence Documentation:

Alignment of: T23657_P6 (SEQ ID NO:1068)×S21C_HUMAN (SEQ ID NO:1062) ••

Alignment segment 1/1:

Alignment:

Sequence name: S21C_HUMAN (SEQ ID NO:1062)

Sequence Documentation:

Alignment of: T23657_P7 (SEQ ID NO:1069)×S21C_HUMAN (SEQ ID NO:1062).

Alignment segment 1/1:

Alignment:

Sequence name: S21C_HUMAN (SEQ ID NO:1062)

Sequence Documentation:

Alignment of: T23657_P8 (SEQ ID NO:1070)×S21C_HUMAN (SEQ ID NO:1062) ••

Alignment segment 1/1:

Alignment:

Sequence name: S21C_HUMAN (SEQ ID NO:1062)

Sequence Documentation:

Alignment of: T23657_P10 (SEQ ID NO:1072)×S21C_HUMAN (SEQ ID NO:1062) ••

Alignment segment 1/1:

Alignment:

Sequence name: S21C_HUMAN (SEQ ID NO:1062)

Sequence Documentation:

Alignment of: T23657_P11 (SEQ ID NO:1073)×S21C_HUMAN (SEQ ID NO:1062) ••

Alignment segment 1/1:

Alignment:

Sequence name: S21C_HUMAN (SEQ ID NO:1062)

Sequence Documentation:

Alignment of: T23657_P12 (SEQ ID NO:1074)×S21C_HUMAN (SEQ ID NO:1062) ••

Alignment segment 1/1:

Alignment:

Sequence name: S21C_HUMAN (SEQ ID NO:1062)

Sequence Documentation:

Alignment of: T23657_P16 (SEQ ID NO:1075)×S21C_HUMAN (SEQ ID NO:1062) ••

Alignment segment 1/1:

Alignment:

Sequence name: S21C_HUMAN (SEQ ID NO:1062)

Sequence Documentation:

Alignment of: T23657_P17 (SEQ ID NO:1076)×S21C_HUMAN (SEQ ID NO:1062) ••

Alignment segment 1/1:

Alignment:

Sequence name: S21C_HUMAN (SEQ ID NO:1062)

Sequence Documentation:

Alignment of: T23657_P21 (SEQ ID NO:1078)×S21C_HUMAN (SEQ ID NO:1062) ••

Alignment segment 1/1:

Alignment:

Sequence name: S21C_HUMAN (SEQ ID NO:1062)

Sequence Documentation:

Alignment of: T23657_P23 (SEQ ID NO:1080)×S21C_HUMAN (SEQ ID NO:1062).

Alignment segment 1/1:

Alignment:

[3395] Expression of solute carrier organic anion transporter family, member 4A1 (SLCO4A1) T23657 Transcripts, which are detectable by amplicon as depicted in sequence name T23657 seg17-18 (SEQ ID NO:1357), in normal and cancerous colon tissues

[3396] Expression of solute carrier organic anion transporter family, member 4A1 (SLCO4A1) transcripts detectable by or according to seg17-18, T23657 amplicon (SEQ ID NO:1357) and T23657 Seg17-18F (SEQ ID NO:1355) T23657 Seg17-18 R (SEQ ID NO:1356) primers was measured by real time PCR. In parallel the expression of four housekeeping genes—PBGD (GenBank Accession No. BC019323 (SEQ ID NO:1576); amplicon—PBGD-amplicon, SEQ ID NO:531), HPRT1 (GenBank Accession No. NM_{—}000194 (SEQ ID NO:1577); amplicon—HPRT1-amplicon, SEQ ID NO:612), G6PD (GenBank Accession No. NM_{—}000402 (SEQ ID NO:1578); G6PD amplicon, SEQ ID NO:615), RPS27A (GenBank Accession No. NM_{—}002954 (SEQ ID NO:1579); RPS27A amplicon, SEQ ID NO:1261), was measured similarly. For each RT sample, the expression of the above amplicon was normalized to the geometric mean of the quantities of the housekeeping genes. The normalized quantity of each RT sample was then divided by the median of the quantities of the normal post-mortem (PM) samples (Sample Nos. 41, 52, 62-67, 69-71, Table 1, above, “Tissue samples in testing panel”), to obtain a value of fold up-regulation for each sample relative to median of the normal PM samples.

[3397] FIG. 59 is a histogram showing over expression of the above-indicated solute carrier organic anion transporter family, member 4A1 (SLCO4A1) transcripts in cancerous colon samples relative to the normal samples. (Values represent the average of duplicate experiments. Error bars indicate the minimal and maximal values obtained.). The number and percentage of samples that exhibit at least 4 fold over-expression, out of the total number of samples tested is indicated in the bottom.

[3398] As is evident from FIG. 59, the expression of solute carrier organic anion transporter family, member 4A1 (SLCO4A1) transcripts detectable by the above amplicon in cancer samples was significantly higher than in the non-cancerous samples (Sample Nos. 41, 52, 62-67, 69-71, Table 1, “Tissue samples in testing panel”). Notably an over-expression of at least 4 fold was found in 28 out of 37 adenocarcinoma samples,

[3399] Statistical analysis was applied to verify the significance of these results, as described below.

[3400] The P value for the difference in the expression levels of solute carrier organic anion transporter family, member 4A1 (SLCO4A1) transcripts detectable by the above amplicon in colon cancer samples versus the normal tissue samples was determined by T test as 7.22E-04.

[3401] Threshold of 4 fold overexpression was found to differentiate between cancer and normal samples with P value of 7.43E-06 as checked by exact fisher test. The above values demonstrate statistical significance of the results.

[3402] Primer pairs are also optionally and preferably encompassed within the present invention; for example, for the above experiment, the following primer pair was used as a non-limiting illustrative example only of a suitable primer pair: T23657seg17-18F forward primer (SEQ ID NO:1355); and T23657seg17-18R reverse primer (SEQ ID NO:1356).

[3403] The present invention also preferably encompasses any amplicon obtained through the use of any suitable primer pair; for example, for the above experiment, the following amplicon was obtained as a non-limiting illustrative example only of a suitable amplicon: T23657seg17-18 (SEQ ID NO:1357).

[3404] Expression of solute carrier organic anion transporter family, member 4A1 (SLCO4A1) T23657 transcripts which are detectable by amplicon as depicted in sequence name T23657 seg22 (SEQ ID NO:1360) in normal and cancerous colon tissues

[3405] Expression of solute carrier organic anion transporter family, member 4A 1 (SLCO4A 1) transcripts detectable by or according to seg22, T23657 amplicon (SEQ ID NO:1360) and T23657 seg22F (SEQ ID NO:1358) T23657 seg22 R (SEQ ID NO:1359) primers was measured by real time PCR. In parallel the expression of four housekeeping genes—PBGD (GenBank Accession No. BC019323 (SEQ ID NO:1576); amplicon—PBGD-amplicon, SEQ ID NO:531), HPRT1 (GenBank Accession No. NM_{—}000194 (SEQ ID NO:1577); amplicon—HPRT1-amplicon, SEQ ID NO:612), G6PD (GenBank Accession No. NM_{—}000402 (SEQ ID NO:1578); G6PD amplicon, SEQ ID NO:615), RPS27A (GenBank Accession No. NM_{—}002954 (SEQ ID NO:1579); RPS27A amplicon, SEQ ID NO:1261), was measured similarly. For each RT sample, the expression of the above amplicon was normalized to the geometric mean of the quantities of the housekeeping genes. The normalized quantity of each RT sample was then divided by the median of the quantities of the normal post-mortem (PM) samples (Sample Nos. 41, 52, 62-67, 69-71, Table 1, above, “Tissue samples in testing panel”), to obtain a value of fold up-regulation for each sample relative to median of the normal PM samples.

[3406] FIG. 60 is a histogram showing over expression of the above-indicated solute carrier organic anion transporter family, member 4A1 (SLCO4A1) transcripts in cancerous colon samples relative to the normal samples (values represent the average of duplicate experiments. Error bars indicate the minimal and maximal values obtained). The number and percentage of samples that exhibit at least 4 fold over-expression, out of the total number of samples tested is indicated in the bottom.

[3407] As is evident from FIG. 60, the expression of solute carrier organic anion transporter family, member 4A1 (SLCO4A1) transcripts detectable by the above amplicon in cancer samples was significantly higher than in the non-cancerous samples (Sample Nos. 41, 52, 62-67, 69-71, Table 1, “Tissue samples in testing panel”). Notably an over-expression of at least 4 fold was found in 20 out of 37 adenocarcinoma samples,

[3408] Statistical analysis was applied to verify the significance of these results, as described below.

[3409] The P value for the difference in the expression levels of solute carrier organic anion transporter family, member 4A1 (SLCO4A1) transcripts detectable by the above amplicon in colon cancer samples versus the normal tissue samples was determined by T test as 3.62E-03.

[3410] Threshold of 4 fold overexpression was found to differentiate between cancer and normal samples with P value of 9.50E-04 as checked by exact fisher test. The above values demonstrate statistical significance of the results.

[3411] Primer pairs are also optionally and preferably encompassed within the present invention; for example, for the above experiment, the following primer pair was used as a non-limiting illustrative example only of a suitable primer pair: T23657seg22F forward primer (SEQ ID NO:1358); and T23657seg22R reverse primer (SEQ ID NO:1359).

[3412] The present invention also preferably encompasses any amplicon obtained through the use of any suitable primer pair; for example, for the above experiment, the following amplicon was obtained as a non-limiting illustrative example only of a suitable amplicon: T23657seg22 (SEQ ID NO:1360).

[3413] Expression of solute carrier organic anion transporter family, member 4A1 (SLCO4A1) T23657 transcripts which are detectable by amplicon as depicted in sequence name T23657 seg29-32 (SEQ ID NO:1363) in normal and cancerous colon tissues

[3414] Expression of solute carrier organic anion transporter family, member 4A 1 (SLCO4A1) transcripts detectable by or according to seg29-32, T23657 amplicon (SEQ ID NO:1363) and T23657 seg29-32F (SEQ ID NO:1361) T23657 seg29-32 R (SEQ ID NO:1362) primers was measured by real time PCR. In parallel the expression of four housekeeping genes—PBGD (GenBank Accession No. BC019323 (SEQ ID NO:1576); amplicon-PBGD-amplicon, SEQ ID NO:531), HPRT1 (GenBank Accession No. NM_{—}000194 (SEQ ID NO:1577); amplicon—HPRT1-amplicon, SEQ ID NO:612), G6PD (GenBank Accession No. NM_{—}000402 (SEQ ID NO:1578); G6PD amplicon, SEQ ID NO:615), RPS27A (GenBank Accession No. NM_{—}002954 (SEQ ID NO:1579); RPS27A amplicon, SEQ ID NO:1261), was measured similarly. For each RT sample, the expression of the above amplicon was normalized to the geometric mean of the quantities of the housekeeping genes. The normalized quantity of each RT sample was then divided by the median of the quantities of the normal post-mortem (PM) samples (Sample Nos. 41, 52, 62-67, 69-71, Table 1, above, “Tissue samples in testing panel”), to obtain a value of fold up-regulation for each sample relative to median of the normal PM samples.

[3415] FIG. 61 is a histogram showing over expression of the above-indicated solute carrier organic anion transporter family, member 4A1 (SLCO4A1) transcripts in cancerous colon samples relative to the normal samples. The number and percentage of samples that exhibit at least 3 fold over-expression, out of the total number of samples tested is indicated in the bottom.

[3416] As is evident from FIG. 61, the expression of solute carrier organic anion transporter family, member 4A1 (SLCO4A1) transcripts detectable by the above amplicon in cancer samples was significantly higher than in the non-cancerous samples (Sample Nos. 41, 52, 62-67, 69-71, Table 1, “Tissue samples in testing panel”). Notably an over-expression of at least 3 fold was found in 23 out of 37 adenocarcinoma samples,

[3417] Statistical analysis was applied to verify the significance of these results, as described below.

[3418] The P value for the difference in the expression levels of solute carrier organic anion transporter family, member 4A1 (SLCO4A1) transcripts detectable by the above amplicon in colon cancer samples versus the normal tissue samples was determined by T test as 1.39E-07.

[3419] Threshold of 3 fold overexpression was found to differentiate between cancer and normal samples with P value of 1.97E-04 as checked by exact fisher test. The above values demonstrate statistical significance of the results.

[3420] Primer pairs are also optionally and preferably encompassed within the present invention; for example, for the above experiment, the following primer pair was used as a non-limiting illustrative example only of a suitable primer pair: T23657seg29-32F forward primer (SEQ ID NO:1361); and T23657seg29-32R reverse primer (SEQ ID NO:1362).

[3421] The present invention also preferably encompasses any amplicon obtained through the use of any suitable primer pair; for example, for the above experiment, the following amplicon was obtained as a non-limiting illustrative example only of a suitable amplicon: T23657seg29-32 (SEQ ID NO:1363).

[3422] Expression of solute carrier organic anion transporter family, member 4A1 (SLCO4AI) T23657 transcripts which are detectable by amplicon as depicted in sequence name T23657 seg41(SEQ ID NO:1366) in normal and cancerous colon tissues

[3423] Expression of solute carrier organic anion transporter family, member 4A1 (SLCO4A 1) transcripts detectable by or according to seg41, T23657 amplicon (SEQ ID NO:1366) and T23657 Seg41F (SEQ ID NO:1364) T23657 Seg41 R (SEQ ID NO:1365) primers was measured by real time PCR. In parallel the expression of four housekeeping genes—PBGD (GenBank Accession No. BC019323 (SEQ ID NO:1576); amplicon—PBGD-amplicon, SEQ ID NO:531), HPRT1 (GenBank Accession No. NM_{—}000194 (SEQ ID NO:1577); amplicon—HPRT1-amplicon, SEQ ID NO:612), G6PD (GenBank Accession No. NM_{—}000402 (SEQ ID NO:1578); G6PD amplicon, SEQ ID NO:615), RPS27A (GenBank Accession No. NM_{—}002954 (SEQ ID NO:1579); RPS27A amplicon, SEQ ID NO:1261), was measured similarly. For each RT sample, the expression of the above amplicon was normalized to the geometric mean of the quantities of the housekeeping genes. The normalized quantity of each RT sample was then divided by the median of the quantities of the normal post-mortem (PM) samples (Sample Nos. 41, 52, 62-67, 69-71, Table 1, above, “Tissue samples in testing panel”), to obtain a value of fold up-regulation for each sample relative to median of the normal PM samples.

[3424] FIG. 62 is a histogram showing over expression of the above-indicated solute carrier organic anion transporter family, member 4A1 (SLCO4A1) transcripts in cancerous colon samples relative to the normal samples. The number and percentage of samples that exhibit at least 4 fold over-expression, out of the total number of samples tested is indicated in the bottom.

[3425] As is evident from FIG. 62, the expression of solute carrier organic anion transporter family, member 4A1 (SLCO4A1) transcripts detectable by the above amplicon in cancer samples was significantly higher than in the non-cancerous samples (Sample Nos. 41, 52, 62-67, 69-71, Table 1, “Tissue samples in testing panel”). Notably an over-expression of at least 4 fold was found in 6 out of 37 adenocarcinoma samples,

[3426] Statistical analysis was applied to verify the significance of these results, as described below.

[3427] The P value for the difference in the expression levels of solute carrier organic anion transporter family, member 4A1 (SLCO4A1) transcripts detectable by the above amplicon in colon cancer samples versus the normal tissue samples was determined by T test as 3.02E-03.

[3428] Threshold of 4 fold overexpression was found to differentiate between cancer and normal samples with P value of 1.89E-01 as checked by exact fisher test. The above values demonstrate statistical significance of the results.

[3429] Primer pairs are also optionally and preferably encompassed within the present invention; for example, for the above experiment, the following primer pair was used as a non-limiting illustrative example only of a suitable primer pair: T23657seg41F forward primer (SEQ ID NO:1364); and T23657seg41R reverse primer (SEQ ID NO:1365).

[3430] The present invention also preferably encompasses any amplicon obtained through the use of any suitable primer pair; for example, for the above experiment, the following amplicon was obtained as a non-limiting illustrative example only of a suitable amplicon: T23657seg41 (SEQ ID NO:1366).

Description for Cluster T51958

[3431] Cluster T51958 features 12 transcript(s) and 48 segment(s) of interest, the names for which are given in Tables 1 and 2, respectively, the sequences themselves are given at the end of the application. The selected protein variants are given in table 3.

[3432] These sequences are variants of the known protein Tyrosine-protein kinase-like 7 precursor (SwissProt accession identifier PTK7_HUMAN; known also according to the synonyms Colon carcinoma kinase-4; CCK-4), SEQ ID NO:1141, referred to herein as the previously known protein.

[3433] Protein Tyrosine-protein kinase-like 7 precursor (SEQ ID NO:1141) is known or believed to have the following function(s): MAY FUNCTION AS A CELL ADHESION MOLECULE. LACKS PROBABLY THE CATALYTIC ACTIVITY OF TYROSINE KINASE. MAY BE CONNECTED TO THE PATHOPHYSIOLOGY OF COLON CARCINOMAS AND/OR MAY REPRESENT A TUMOR PROGRESSION MARKER. The sequence for protein Tyrosine-protein kinase-like 7 precursor is given at the end of the application, as “Tyrosine-protein kinase-like 7 precursor amino acid sequence”. Known polymorphisms for this sequence are as shown in Table 4.

[3434] Protein Tyrosine-protein kinase-like 7 precursor (SEQ ID NO:1141) localization is believed to be Type I membrane protein.

[3435] The following GO Annotation(s) apply to the previously known protein. The following annotation(s) were found: protein amino acid phosphorylation; cell adhesion; signal transduction, which are annotation(s) related to Biological Process; protein tyrosine kinase; transmembrane receptor protein tyrosine kinase; receptor; protein binding; ATP binding; transferase, which are annotation(s) related to Molecular Function; and integral plasma membrane protein, which are annotation(s) related to Cellular Component.

[3436] The GO assignment relies on information from one or more of the SwissProt/TremB1 Protein knowledgebase, available from <http://www.expasy.ch/sprot/>; or Locuslink, available from <http://www.ncbi.nlm.nih.gov/projects/LocusLink/>.

[3437] Cluster T51958 can be used as a diagnostic marker according to overexpression of transcripts of this cluster in cancer. Expression of such transcripts in normal tissues is also given according to the previously described methods. The term “number” in the left hand column of the table and the numbers on the y-axis of the figure below refer to weighted expression of ESTs in each category, as “parts per million” (ratio of the expression of ESTs for a particular cluster to the expression of all ESTs in that category, according to parts per million).

[3438] Overall, the following results were obtained as shown with regard to the histograms in FIG. 63 and Table 5. This cluster is overexpressed (at least at a minimum level) in the following pathological conditions: epithelial malignant tumors and a mixture of malignant tumors from different tissues.

[3439] As noted above, cluster T51958 features 12 transcript(s), which were listed in Table 1 above. These transcript(s) encode for protein(s) which are variant(s) of protein Tyrosine-protein kinase-like 7 precursor (SEQ ID NO:1141). A description of each variant protein according to the present invention is now provided.

[3440] Variant protein T51958_PEA_{—}1_P5 (SEQ ID NO:1151) according to the present invention has an amino acid sequence as given at the end of the application; it is encoded by transcript(s) T51958_PEA_{—}1_T4 (SEQ ID NO:1081). An alignment is given to the known protein (Tyrosine-protein kinase-like 7 precursor (SEQ ID NO:1141)) at the end of the application. One or more alignments to one or more previously published protein sequences are given at the end of the application. A brief description of the relationship of the variant protein according to the present invention to each such aligned protein is as follows:

[3441] Comparison report between T51958_PEA_{—}1_P5 (SEQ ID NO:1151) and PTK7_HUMAN_V4 (SEQ ID NO:1143):

[3442] 1. An isolated chimeric polypeptide encoding for T51958_PEA_{—}1_P5 (SEQ ID NO:1151), comprising a first amino acid sequence being at least 90% homologous to MGAARGSPARPRRLPLLSVLLLPLLGGTQTAIVFIKQPSSQDALQGRRALLRCEVEAPGP VHVYWLLDGAPVQDTERRFAQGSSLSFAAVDRLQDSGTFQCVARDDVTGEEARSANA SFNIKWIEAGPVVLKHPASEAEIQPQTQVTLRCHIDGHPRPTYQWFRDGTPLSDGQSNH TVSSKERNLTLRPAGPEHSGLYSCCAHSAFGQACSSQNFTLSIADESFARVVLAPQDVV VARYEEAMFHCQFSAQPPPSLQWLFEDETPITNRSRPPHLRRATVFANGSLLLTQVRPR NAGIYRCIGQGQRGPPIILEATLHLAEIEDMPLFEPRVFTAGSEERVTCLPPKGLPEPSVW WEHAGVRLPTHGRVYQKGHELVLANIAESDAGVYTCHAANLAGQRRQDVNITVATVP SWLKKPQDSQLEEGKPGYLDCLTQATPKPTVVWYRNQMLISEDSRFEVFKNGTLRINS VEVYDGTWYRCMSSTPAGSIEAQARVQVLEKLKFTPPPQPQQCMEFDKEATVPCSATG REKPTIKWERADGSSLPEWVTDNAGTLHFARVTRDDAGNYTCIASNGPQGQIRAHVQL TVAVFITFKVEPERTTVYQGHTALLQCEAQGDPKPLIQWKGKDRILDPTKLGPRMHIFQ NGSLVIHDVAPEDSGRYTCIAGNSCNIKHTEAPLYVV corresponding to amino acids 1-682 of PTK7_HUMAN_V4 (SEQ ID NO:1143), which also corresponds to amino acids 1-682 of T51958_PEA_{—}1_P5 (SEQ ID NO:1151), and a second amino acid sequence being at least 70%, optionally at least 80%, preferably at least 85%, more preferably at least 90% and most preferably at least 95% homologous to a polypeptide having the sequence GMGWGGLCCTGSGGPRRLSPCTQPLCTEHGTEAIFVAAVGIRPSHHAAAQS (SEQ ID NO:1451) corresponding to amino acids 683-733 of T51958_PEA_{—}1_P5 (SEQ ID NO:1151), wherein said first amino acid sequence and second amino acid sequence are contiguous and in a sequential order.

[3443] 2. An isolated polypeptide encoding for a tail of T51958_PEA_{—}1_P5 (SEQ ID NO:11151), comprising a polypeptide being at least 70%, optionally at least about 80%, preferably at least about 85%, more preferably at least about 90% and most preferably at least about 95% homologous to the sequence GMGWGGLCCTGSGGPRRLSPCTQPLCTEHGTEAIFVAAVGIRPSHHAAAQS (SEQ ID NO:1451) in T51958_PEA_{—}1_P5 (SEQ ID NO:1151).

[3444] It should be noted that the known protein sequence (PTK7_HUMAN (SEQ ID NO:1141)) has one or more changes than the sequence given at the end of the application and named as being the amino acid sequence for PTK7_HUMAN_V4 (SEQ ID NO:1143). These changes were previously known to occur and are listed in the table below.

[3445] The location of the variant protein was determined according to results from a number of different software programs and analyses, including analyses from SignalP and other specialized programs. The variant protein is believed to be located as follows with regard to the cell: secreted. The protein localization is believed to be secreted because both signal-peptide prediction programs predict that this protein has a signal peptide, and neither trans-membrane region prediction program predicts that this protein has a trans-membrane region.

[3446] Variant protein T51958_PEA_{—}1_P5 (SEQ ID NO:1151) is encoded by the following transcript(s): T51958_PEA_{—}1_T4 (SEQ ID NO:1081), for which the sequence(s) is/are given at the end of the application. The coding portion of transcript T51958_PEA_{—}1_T4 (SEQ ID NO:1081) is shown in bold; this coding portion starts at position 209 and ends at position 2407. The transcript also has the following SNPs as listed in Table 8 (given according to their position on the nucleotide sequence, with the alternative nucleic acid listed; the last column indicates whether the SNP is known or not; the presence of known SNPs in variant protein T51958_PEA_{—}1_P5 (SEQ ID NO:1151) sequence provides support for the deduced sequence of this variant protein according to the present invention).

[3447] Variant protein T51958_PEA_{—}1_P6 (SEQ ID NO:1152) according to the present invention has an amino acid sequence as given at the end of the application; it is encoded by transcript(s) T51958_PEA_{—}1_T5 (SEQ ID NO:1082). An alignment is given to the known protein (Tyrosine-protein kinase-like 7 precursor (SEQ ID NO:1141)) at the end of the application. One or more alignments to one or more previously published protein sequences are given at the end of the application. A brief description of the relationship of the variant protein according to the present invention to each such aligned protein is as follows:

[3448] Comparison report between T51958_PEA_{—}1_P6 (SEQ ID NO:152) and PTK7_HUMAN_V4 (SEQ ID NO:1143):

[3449] 1. An isolated chimeric polypeptide encoding for T51958_PEA_{—}1_P6 (SEQ ID NO:1152), comprising a first amino acid sequence being at least 90% homologous to MGAARGSPARPRRLPLLSVLLLPLLGGTQTAIVFIKQPSSQDALQGRRALLRCEVEAPGP VHVYWLLDGAPVQDTERRFAQGSSLSFAAVDRLQDSGTFQCVARDDVTGEEARSANA SFNIKWIEAGPVVLKHPASEAEIQPQTQVTLRCHIDGHPRPTYQWFRDGTPLSDGQSNH TVSSKERNLTLRPAGPEHSGLYSCCAHSAFGQACSSQNFTLSIADESFARVVLAPQDVV VARYEEAMFHCQFSAQPPPSLQWLFEDETPITNRSRPPHLRRATVFANGSLLLTQVRPR NAGIYRCIGQGQRGPPIILEATLHLAEIEDMPLFEPRVFTAGSEERVTCLPPKGLPEPSVW WEHAGVRLPTHGRVYQKGHELVLANIAESDAGVYTCHAANLAGQRRQDVNITVATVP SWLKKPQDSQLEEGKPGYLDCLTQATPKPTVVWYRNQMLISEDSRFEVFKNGTLRINS VEVYDGTWYRCMSSTPAGSIEAQARVQVLEKLKFTPPPQPQQCMEFDKEATVPCSATG REKPTIKWERADGS SLPEWVTDNAGTLHFARVTRDDAGNYTCIASNGPQGQIRAHVQL TVAVFITFKVEPERTTVYQGHTALLQCEAQGDPKPLIQWKGKDRILDPTKLGPRM corresponding to amino acids 1-641 of PTK7_HUMAN_V4 (SEQ ID NO:1143), which also corresponds to amino acids 1-641 of T51958_PEA_{—}1_P6 (SEQ ID NO:1152), and a second amino acid sequence being at least 70%, optionally at least 80%, preferably at least 85%, more preferably at least 90% and most preferably at least 95% homologous to a polypeptide having the sequence APW corresponding to amino acids 642-644 of T51958_PEA_{—}1_P6 (SEQ ID NO:1152), wherein said first amino acid sequence and second amino acid sequence are contiguous and in a sequential order.

[3450] It should be noted that the known protein sequence (PTK7_HUMAN (SEQ ID NO:1141)) has one or more changes than the sequence given at the end of the application and named as being the amino acid sequence for PTK7_HUMAN_V4 (SEQ ID NO:1143). These changes were previously known to occur and are listed in the table below.

[3451] The location of the variant protein was determined according to results from a number of different software programs and analyses, including analyses from SignalP and other specialized programs. The variant protein is believed to be located as follows with regard to the cell: secreted. The protein localization is believed to be secreted because both signal-peptide prediction programs predict that this protein has a signal peptide, and neither trans-membrane region prediction program predicts that this protein has a trans-membrane region.

[3452] Variant protein T51958_PEA_{—}1_P6 (SEQ ID NO:1152) is encoded by the following transcript(s): T51958_PEA_{—}1_T5 (SEQ ID NO:1082), for which the sequence(s) is/are given at the end of the application. The coding portion of transcript T51958_PEA_{—}1_T5 (SEQ ID NO:1082) is shown in bold; this coding portion starts at position 209 and ends at position 2140. The transcript also has the following SNPs as listed in Table 10 (given according to their position on the nucleotide sequence, with the alternative nucleic acid listed; the last column indicates whether the SNP is known or not; the presence of known SNPs in variant protein T51958_PEA_{—}1_P6 (SEQ ID NO:1152) sequence provides support for the deduced sequence of this variant protein according to the present invention).

[3453] Variant protein T51958_PEA_{—}1_P28 (SEQ ID NO:1153) according to the present invention has an amino acid sequence as given at the end of the application; it is encoded by transcript(s) T51958_PEA_{—}1_T37 (SEQ ID NO:1089). An alignment is given to the known protein (Tyrosine-protein kinase-like 7 precursor (SEQ ID NO:1141)) at the end of the application. One or more alignments to one or more previously published protein sequences are given at the end of the application. A brief description of the relationship of the variant protein according to the present invention to each such aligned protein is as follows:

[3454] Comparison report between T51958_PEA_{—}1_P28 (SEQ ID NO:1153) and PTK7_HUMAN_V11 (SEQ ID NO:1144):

[3455] 1. An isolated chimeric polypeptide encoding for T51958_PEA_{—}1_P28 (SEQ ID NO:1153), comprising a first amino acid sequence being at least 90% homologous to MGAARGSPARPRRLPLLSVLLLPLLGGTQTAIVFIKQPSSQDALQGRRALLRCEVEAPGP VHVYWLLDGAPVQDTERRFAQGSSLSFAAVDRLQDSGTFQCVARDDVTGEEARSANA SFNIKWIEAGPVVLKHPASEAEIQPQTQVTLRCHIDGHPRPTYQWFRDGTPLSDGQSNH TVSSKERNLTLRPAGPEHSGLYSCCAHSAFGQACSSQNFTLSIADESFARVVLAPQDVV VARYEEAMFHCQFSAQPPPSLQWLFEDETPITNRSRPPHLRRATVFANGSLLLTQVRPR NAGIYRCIGQGQRGPPIILEATLHLAEIEDMPLFEPRVFTAGSEERVTCLPPKGLPEPSVW WEHAGVRLPTHGRVYQKGHELVLANIAESDAGVYTCHAANLAGQRRQDVNITVA corresponding to amino acids 1-409 of PTK7_HUMAN_V11 (SEQ ID NO:1144), which also corresponds to amino acids 1-409 of T51958_PEA_{—}1_P28 (SEQ ID NO:1153), and a second amino acid sequence being at least 70%, optionally at least 80%, preferably at least 85%, more preferably at least 90% and most preferably at least 95% homologous to a polypeptide having the sequence SEHLCPEGQGEVEGNTGLGVMDRGFPGTHLRSSQFWALQAWESVHYWESV corresponding to amino acids 410-459 of T51958_PEA_{—}1_P28 (SEQ ID NO:1153), wherein said first amino acid sequence and second amino acid sequence are contiguous and in a sequential order.

[3456] 2. An isolated polypeptide encoding for a tail of T51958_PEA_{—}1_P28 (SEQ ID NO:1153), comprising a polypeptide being at least 70%, optionally at least about 80%, preferably at least about 85%, more preferably at least about 90% and most preferably at least about 95% homologous to the sequence SEHLCPEGQGEVEGNTGLGVMDRGFPGTHLRSSQFWALQAWESVHYWESV in T51958_PEA_{—}1_P28 (SEQ ID NO:1153).

[3457] It should be noted that the known protein sequence (PTK7_HUMAN (SEQ ID NO:1141)) has one or more changes than the sequence given at the end of the application and named as being the amino acid sequence for PTK7_HUMAN_V11 (SEQ ID NO:1144). These changes were previously known to occur and are listed in the table below.

Comparison report between T51958_PEA_{—}1_P28 (SEQ ID NO:1153) and Q8NFA5 (SEQ ID NO:1147):

[3458] 1. An isolated chimeric polypeptide encoding for T51958_PEA_{—}1_P28 (SEQ ID NO:1153), comprising a first amino acid sequence being at least 90% homologous to MGAARGSPARPRRLPLLSVLLLPLLGGTQTAIVFIKQPSSQDALQGRRALLRCEVEAPGP VHVYWLLDGAPVQDTERRFAQGSSLSFAAVDRLQDSGTFQCVARDDVTGEEARSANA SFNIKWIEAGPVVLKHPASEAEIQPQTQVTLRCHIDGHPRPTYQWFRDGTPLSDGQSNH TVSSKERNLTLRPAGPEHSGLYSCCAHSAFGQACSSQNFTLSIADESFARVVLAPQDVV VARYEEAMFHCQFSAQPPPSLQWLFEDETPITNRSRPPHLRRATVFANGSLLLTQVRPR NAGIYRCIGQGQRGPPIILEATLHLAEIEDMPLFEPRVFTAGSEERVTCLPPKGLPEPSVW WEHAGVRLPTHGRVYQKGHELVLANIAESDAGVYTCHAANLAGQRRQDVNITVA corresponding to amino acids 1-409 of Q8NFA5 (SEQ ID NO:1147), which also corresponds to amino acids 1-409 of T51958_PEA_{—}1_P28 (SEQ ID NO:153), and a second amino acid sequence being at least 70%, optionally at least 80%, preferably at least 85%, more preferably at least 90% and most preferably at least 95% homologous to a polypeptide having the sequence SEHLCPEGQGEVEGNTGLGVMDRGFPGTHLRSSQFWALQAWESVHYWESV corresponding to amino acids 410-459 of T51958_PEA_{—}1_P28 (SEQ ID NO:1153), wherein said first amino acid sequence and second amino acid sequence are contiguous and in a sequential order.

[3459] 2. An isolated polypeptide encoding for a tail of T51958_PEA_{—}1_P28 (SEQ ID NO:1153) comprising a polypeptide being at least 70%, optionally at least about 80%, preferably at least about 85%, more preferably at least about 90% and most preferably at least about 95% homologous to the sequence SEHLCPEGQGEVEGNTGLGVMDRGFPGTHLRSSQFWALQAWESVHYWESV in T51958_PEA_{—}1_P28 (SEQ ID NO:1153).

Comparison report between T51958_PEA_{—}1_P28 (SEQ ID NO:1153) and Q8NFA6 (SEQ ID NO:1149):

[3460] 1. An isolated chimeric polypeptide encoding for T51958_PEA_{—}1_P28 (SEQ ID NO:1153), comprising a first amino acid sequence being at least 90% homologous to MGAARGSPARPRRLPLLSVLLLPLLGGTQTAIVFIKQPSSQDALQGRRALLRCEVEAPGP VHVYWLLDGAPVQDTERRFAQGSSLSFAAVDRLQDSGTFQCVARDDVTGEEARSANA SFNIKWIEAGPVVLKHPASEAEIQPQTQVTLRCHIDGHPRPTYQWFRDGTPLSDGQSNH TVSSKERNLTLRPAGPEHSGLYSCCAHSAFGQACSSQNFTLSIADESFARVVLAPQDVV VARYEEAMFHCQFSAQPPPSLQWLFEDETPITNRSRPPHLRRATVFANGSLLLTQVRPR NAGIYRCIGQGQRGPPIILEATLHLAEIEDMPLFEPRVFTAGSEERVTCLPPKGLPEPSVW WEHAGVRLPTHGRVYQKGHELVLANIAESDAGVYTCHAANLAGQRRQDVNITVA corresponding to amino acids 1-409 of Q8NFA6 (SEQ ID NO:1149), which also corresponds to amino acids 1-409 of T51958_PEA_{—}1_P28 (SEQ ID NO:153), and a second amino acid sequence being at least 70%, optionally at least 80%, preferably at least 85%, more preferably at least 90% and most preferably at least 95% homologous to a polypeptide having the sequence SEHLCPEGQGEVEGNTGLGVMDRGFPGTHLRSSQFWALQAWESVHYWESV corresponding to amino acids 410-459 of T51958_PEA_{—}1_P28 (SEQ ID NO:1153), wherein said first amino acid sequence and second amino acid sequence are contiguous and in a sequential order.

[3461] 2. An isolated polypeptide encoding for a tail of T51958_PEA_{—}1_P28 (SEQ ID NO:1153), comprising a polypeptide being at least 70%, optionally at least about 80%, preferably at least about 85%, more preferably at least about 90% and most preferably at least about 95% homologous to the sequence SEHLCPEGQGEVEGNTGLGVMDRGFPGTHLRSSQFWALQAWESVHYWESV in T51958_PEA_{—}1_P28 (SEQ ID NO:1153).

Comparison report between T51958_PEA_{—}1_P28 (SEQ ID NO:1153) and Q8NFA7 (SEQ ID NO:1148):

[3462] 1. An isolated chimeric polypeptide encoding for T51958_PEA_{—}1_P28 (SEQ ID NO:1153), comprising a first amino acid sequence being at least 90% homologous to MGAARGSPARPRRLPLLSVLLLPLLGGTQTAIVFIKQPSSQDALQGRRALLRCEVEAPGP VHVYWLLDGAPVQDTERRFAQGSSLSFAAVDRLQDSGTFQCVARDDVTGEEARSANA SFNIKWIEAGPVVLKHPASEAEIQPQTQVTLRCHIDGHPRPTYQWFRDGTPLSDGQSNH TVSSKERNLTLRPAGPEHSGLYSCCAHSAFGQACSSQNFTLSIADESFARVVLAPQDVV VARYEEAMFHCQFSAQPPPSLQWLFEDETPITNRSRPPHLRRATVFANGSLLLTQVRPR NAGIYRCIGQGQRGPPIILEATLHLAEIEDMPLFEPRVFTAGSEERVTCLPPKGLPEPSVW WEHAGVRLPTHGRVYQKGHELVLANIAESDAGVYTCHAANLAGQRRQDVNITVA corresponding to amino acids 1-409 of Q8NFA7 (SEQ ID NO:1148), which also corresponds to amino acids 1-409 of T51958_PEA_{—}1_P28 (SEQ ID NO:153), and a second amino acid sequence being at least 70%, optionally at least 80%, preferably at least 85%, more preferably at least 90% and most preferably at least 95% homologous to a polypeptide having the sequence SEHLCPEGQGEVEGNTGLGVMDRGFPGTHLRSSQFWALQAWESVHYWESV corresponding to amino acids 410-459 of T51958_PEA_{—}1_P28 (SEQ ID NO:1153), wherein said first amino acid sequence and second amino acid sequence are contiguous and in a sequential order.

[3463] 2. An isolated polypeptide encoding for a tail of T51958_PEA_{—}1_P28 (SEQ ID NO:1153), comprising a polypeptide being at least 70%, optionally at least about 80%, preferably at least about 85%, more preferably at least about 90% and most preferably at least about 95% homologous to the sequence SEHLCPEGQGEVEGNTGLGVMDRGFPGTHLRSSQFWALQAWESVHYWESV in T51958_PEA_{—}1_P28 (SEQ ID NO:1153).

Comparison report between T51958_PEA_{—}1_P28 (SEQ ID NO:1153) and Q8NFA8 (SEQ ID NO:1146):

[3464] 1. An isolated chimeric polypeptide encoding for T51958_PEA_{—}1_P28 (SEQ ID NO:1153), comprising a first amino acid sequence being at least 90% homologous to MGAARGSPARPRRLPLLSVLLLPLLGGTQTAIVFIKQPSSQDALQGRRALLRCEVEAPGP VHVYWLLDGAPVQDTERRFAQGSSLSFAAVDRLQDSGTFQCVARDDVTGEEARSANA SFNIKWIEAGPVVLKHPASEAEIQPQTQVTLRCHIDGHPRPTYQWFRDGTPLSDGQSNH TVSSKERNLTLRPAGPEHSGLYSCCAHSAFGQACSSQNFTLSIADESFARVVLAPQDVV VARYEEAMFHCQFSAQPPPSLQWLFEDETPITNRSRPPHLRRATVFANGSLLLTQVRPR NAGIYRCIGQGQRGPPIILEATLHLAEIEDMPLFEPRVFTAGSEERVTCLPPKGLPEPSVW WEHAGVRLPTHGRVYQKGHELVLANIAESDAGVYTCHAANLAGQRRQDVNITVA corresponding to amino acids 1-409 of Q8NFA8 (SEQ ID NO:1146), which also corresponds to amino acids 1-409 of T51958_PEA_{—}1_P28 (SEQ ID NO:1153), and a second amino acid sequence being at least 70%, optionally at least 80%, preferably at least 85%, more preferably at least 90% and most preferably at least 95% homologous to a polypeptide having the sequence SEHLCPEGQGEVEGNTGLGVMDRGFPGTHLRSSQFWALQAWESVHYWESV corresponding to amino acids 410-459 of T51958_PEA_{—}1_P28 (SEQ ID NO:1153), wherein said first amino acid sequence and second amino acid sequence are contiguous and in a sequential order.

[3465] 2. An isolated polypeptide encoding for a tail of T51958_PEA_{—}1_P28 (SEQ ID NO:1153) comprising a polypeptide being at least 70%, optionally at least about 80%, preferably at least about 85%, more preferably at least about 90% and most preferably at least about 95% homologous to the sequence SEHLCPEGQGEVEGNTGLGVMDRGFPGTHLRSSQFWALQAWESVHYWESV in T51958_PEA_{—}1_P28 (SEQ ID NO:1153).

[3466] Comparison report between T51958_PEA_{—}1_P28 (SEQ ID NO:1153) and AAN04862 (SEQ ID NO:1150) (SEQ ID NO:1150):

[3467] 1. An isolated chimeric polypeptide encoding for T51958_PEA_{—}1_P28 (SEQ ID NO:153), comprising a first amino acid sequence being at least 90% homologous to MGAARGSPARPRRLPLLSVLLLPLLGGTQTAIVFIKQPSSQDALQGRRALLRCEVEAPGP VHVYWLLDGAPVQDTERRFAQGSSLSFAAVDRLQDSGTFQCVARDDVTGEEARSANA SFNIKWIEAGPVVLKHPASEAEIQPQTQVTLRCHIDGHPRPTYQWFRDGTPLSDGQSNH TVSSKERNLTLRPAGPEHSGLYSCCAHSAFGQACSSQNFTLSIADESFARVVLAPQDVV VARYEEAMFHCQFSAQPPPSLQWLFEDETPITNRSRPPHLRRATVFANGSLLLTQVRPR NAGIYRCIGQGQRGPPIILEATLHLAEIEDMPLFEPRVFTAGSEERVTCLPPKGLPEPSVW WEHAGVRLPTHGRVYQKGHELVLANIAESDAGVYTCHAANLAGQRRQDVNITVA corresponding to amino acids 1-409 of AAN04862 (SEQ ID NO:1150), which also corresponds to amino acids 1-409 of T51958_PEA_{—}1_P28 (SEQ ID NO:1153), and a second amino acid sequence being at least 70%, optionally at least 80%, preferably at least 85%, more preferably at least 90% and most preferably at least 95% homologous to a polypeptide having the sequence SEHLCPEGQGEVEGNTGLGVMDRGFPGTHLRSSQFWALQAWESVHYWESV corresponding to amino acids 410-459 of T51958_PEA_{—}1_P28 (SEQ ID NO:1153), wherein said first amino acid sequence and second amino acid sequence are contiguous and in a sequential order.

[3468] 2. An isolated polypeptide encoding for a tail of T51958_PEA_{—}1_P28 (SEQ ID NO:1153) comprising a polypeptide being at least 70%, optionally at least about 80%, preferably at least about 85%, more preferably at least about 90% and most preferably at least about 95% homologous to the sequence SEHLCPEGQGEVEGNTGLGVMDRGFPGTHLRSSQFWALQAWESVHYWESV in T51958_PEA_{—}1_P28 (SEQ ID NO:1153).

[3469] The location of the variant protein was determined according to results from a number of different software programs and analyses, including analyses from SignalP and other specialized programs. The variant protein is believed to be located as follows with regard to the cell: secreted. The protein localization is believed to be secreted because both signal-peptide prediction programs predict that this protein has a signal peptide, and neither trans-membrane region prediction program predicts that this protein has a trans-membrane region.

[3470] Variant protein T51958_PEA_{—}1_P28 (SEQ ID NO:1153) is encoded by the following transcript(s): T51958_PEA_{—}1_T37 (SEQ ID NO:1089), for which the sequence(s) is/are given at the end of the application. The coding portion of transcript T51958_PEA_{—}1_T37 (SEQ ID NO:1089) is shown in bold; this coding portion starts at position 209 and ends at position 1585.

[3471] Variant protein T51958_PEA_{—}1_P30 (SEQ ID NO:1154) according to the present invention has an amino acid sequence as given at the end of the application; it is encoded by transcript(s) T51958_PEA_{—}1_T40 (SEQ ID NO:1091). An alignment is given to the known protein (Tyrosine-protein kinase-like 7 precursor (SEQ ID NO:1141)) at the end of the application. One or more alignments to one or more previously published protein sequences are given at the end of the application. A brief description of the relationship of the variant protein according to the present invention to each such aligned protein is as follows:

[3472] Comparison report between T51958_PEA_{—}1_P30 (SEQ ID NO:1154) and PTK7_HUMAN_V13 (SEQ ID NO:1145) (SEQ ID NO:1145):

[3473] 1. An isolated chimeric polypeptide encoding for T51958_PEA_{—}1_P30 (SEQ ID NO:1154), comprising a first amino acid sequence being at least 90% homologous to MGAARGSPARPRRLPLLSVLLLPLLGGTQTAIVFIKQPSSQDALQGRRALLRCEVEAPGP VHVYWLLDGAPVQDTERRFAQGSSLSFAAVDRLQDSGTFQCVARDDVTGEEARSANA SFNIK corresponding to amino acids 1-122 of PTK7_HUMAN_V 13 (SEQ ID NO:1145), which also corresponds to amino acids 1-122 of T51958_PEA_{—}1_P30 (SEQ ID NO:1154), and a second amino acid sequence being at least 70%, optionally at least 80%, preferably at least 85%, more preferably at least 90% and most preferably at least 95% homologous to a polypeptide having the sequence CESQGGCAQSPCQTLND (SEQ ID NO:1453) corresponding to amino acids 123-139 of T51958_PEA_{—}1_P30 (SEQ ID NO:1154), wherein said first amino acid sequence and second amino acid sequence are contiguous and in a sequential order.

[3474] 2. An isolated polypeptide encoding for a tail of T51958_PEA_{—}1_P30 (SEQ ID NO:1154) comprising a polypeptide being at least 70%, optionally at least about 80%, preferably at least about 85%, more preferably at least about 90% and most preferably at least about 95% homologous to the sequence CESQGGCAQSPCQTLND (SEQ ID NO:1453) in T51958_PEA_{—}1_P30 (SEQ ID NO:1154).

[3475] It should be noted that the known protein sequence (PTK7_HUMAN (SEQ ID NO:1141)) has one or more changes than the sequence given at the end of the application and named as being the amino acid sequence for PTK7_HUMAN_V13 (SEQ ID NO:1145). These changes were previously known to occur and are listed in the table below.

[3476] The location of the variant protein was determined according to results from a number of different software programs and analyses, including analyses from SignalP and other specialized programs. The variant protein is believed to be located as follows with regard to the cell: secreted. The protein localization is believed to be secreted because both signal-peptide prediction programs predict that this protein has a signal peptide, and neither trans-membrane region prediction program predicts that this protein has a trans-membrane region.

[3477] Variant protein T51958_PEA_{—}1_P30 (SEQ ID NO:1154) is encoded by the following transcript(s): T51958_PEA_{—}1_T40 (SEQ ID NO:1091), for which the sequence(s) is/are given at the end of the application. The coding portion of transcript T51958_PEA_{—}1_T40 (SEQ ID NO:1091) is shown in bold; this coding portion starts at position 209 and ends at position 625.

[3478] Variant protein T51958_PEA_{—}1_P34 (SEQ ID NO:1155) according to the present invention has an amino acid sequence as given at the end of the application; it is encoded by transcript(s) T51958_PEA_{—}1_T8 (SEQ ID NO:1084). An alignment is given to the known protein (Tyrosine-protein kinase-like 7 precursor (SEQ ID NO:1141)) at the end of the application. One or more alignments to one or more previously published protein sequences are given at the end of the application. A brief description of the relationship of the variant protein according to the present invention to each such aligned protein is as follows:

[3479] Comparison report between T51958_PEA_{—}1_P34 (SEQ ID NO:1155) and PTK7_HUMAN_V3 (SEQ ID NO:1142):

[3480] 1. An isolated chimeric polypeptide encoding for T51958_PEA_{—}1_P34 (SEQ ID NO:1155), comprising a first amino acid sequence being at least 90% homologous to MGAARGSPARPRRLPLLSVLLLPLLGGTQTAIVFIKQPSSQDALQGRRALLRCEVEAPGP VHVYWLLDGAPVQDTERRFAQGSSLSFAAVDRLQDSGTFQCVARDDVTGEEARSANA SFNIKWIEAGPVVLKHPASEAEIQPQTQVTLRCHIDGHPR corresponding to amino acids 1-157 of PTK7_HUMAN_V3 (SEQ ID NO:1142), which also corresponds to amino acids 1-157 of T51958_PEA_{—}1_P34 (SEQ ID NO:1155).

[3481] It should be noted that the known protein sequence (PTK7_HUMAN (SEQ ID NO:1141)) has one or more changes than the sequence given at the end of the application and named as being the amino acid sequence for PTK7_HUMAN_V3 (SEQ ID NO:1142). These changes were previously known to occur and are listed in the table below.

[3482] The location of the variant protein was determined according to results from a number of different software programs and analyses, including analyses from SignalP and other specialized programs. The variant protein is believed to be located as follows with regard to the cell: secreted. The protein localization is believed to be secreted because both signal-peptide prediction programs predict that this protein has a signal peptide, and neither trans-membrane region prediction program predicts that this protein has a trans-membrane region.

[3483] Variant protein T51958_PEA_{—}1_P34 (SEQ ID NO:1155) is encoded by the following transcript(s): T51958_PEA_{—}1_T8 (SEQ ID NO:1084), for which the sequence(s) is/are given at the end of the application. The coding portion of transcript T51958_PEA_{—}1_T8 (SEQ ID NO:1084) is shown in bold; this coding portion starts at position 209 and ends at position 679. The transcript also has the following SNPs as listed in Table 14 (given according to their position on the nucleotide sequence, with the alternative nucleic acid listed; the last column indicates whether the SNP is known or not; the presence of known SNPs in variant protein T51958_PEA_{—}1_P34 (SEQ ID NO:1155) sequence provides support for the deduced sequence of this variant protein according to the present invention).

[3484] Variant protein T51958_PEA_{—}1_P35 (SEQ ID NO:1156) according to the present invention has an amino acid sequence as given at the end of the application; it is encoded by transcript(s) T51958_PEA_{—}1_T6 (SEQ ID NO:1083). An alignment is given to the known protein (Tyrosine-protein kinase-like 7 precursor (SEQ ID NO:1141)) at the end of the application. One or more alignments to one or more previously published protein sequences are given at the end of the application. A brief description of the relationship of the variant protein according to the present invention to each such aligned protein is as follows:

[3485] Comparison report between T51958_PEA_{—}1_P35 (SEQ ID NO:1156) and PTK7_HUMAN_V11 (SEQ ID NO:1144):

[3486] 1. An isolated chimeric polypeptide encoding for T51958_PEA_{—}1_P35 (SEQ ID NO:1156), comprising a first amino acid sequence being at least 90% homologous to MGAARGSPARPRRLPLLSVLLLPLLGGTQTAIVFIKQPSSQDALQGRRALLRCEVEAPGP VHVYWLLDGAPVQDTERRFAQGSSLSFAAVDRLQDSGTFQCVARDDVTGEEARSANA SFNIKWIEAGPVVLKHPASEAEIQPQTQVTLRCHIDGHPRPTYQWFRDGTPLSDGQSNH TVSSKERNLTLRPAGPEHSGLYSCCAHSAFGQACSSQNFTLSIA corresponding to amino acids 1-220 of PTK7_HUMAN_V11 (SEQ ID NO:1144), which also corresponds to amino acids 1-220 of T51958_PEA_{—}1_P35 (SEQ ID NO:1156), and a second amino acid sequence being at least 70%, optionally at least 80%, preferably at least 85%, more preferably at least 90% and most preferably at least 95% homologous to a polypeptide having the sequence GEPGVGAEGMR (SEQ ID NO:1454) corresponding to amino acids 221-231 of T51958_PEA_{—}1_P35 (SEQ ID NO:1156), wherein said first amino acid sequence and second amino acid sequence are contiguous and in a sequential order.

[3487] 2. An isolated polypeptide encoding for a tail of T51958_PEA_{—}1_P35 (SEQ ID NO:1156) comprising a polypeptide being at least 70%, optionally at least about 80%, preferably at least about 85%, more preferably at least about 90% and most preferably at least about 95% homologous to the sequence GEPGVGAEGMR (SEQ ID NO:1454) in T51958_PEA_{—}1_P35 (SEQ ID NO:1156).

[3488] It should be noted that the known protein sequence (PTK7_HUMAN (SEQ ID NO:1141)) has one or more changes than the sequence given at the end of the application and named as being the amino acid sequence for PTK7_HUMAN_V11 (SEQ ID NO:1144). These changes were previously known to occur and are listed in the table below.

[3489] The location of the variant protein was determined according to results from a number of different software programs and analyses, including analyses from SignalP and other specialized programs. The variant protein is believed to be located as follows with regard to the cell: secreted. The protein localization is believed to be secreted because both signal-peptide prediction programs predict that this protein has a signal peptide, and neither trans-membrane region prediction program predicts that this protein has a trans-membrane region.

[3490] Variant protein T51958_PEA_{—}1_P35 (SEQ ID NO:1156) is encoded by the following transcript(s): T51958_PEA_{—}1_T6 (SEQ ID NO:1083), for which the sequence(s) is/are given at the end of the application. The coding portion of transcript T51958_PEA_{—}1_T6 (SEQ ID NO:1083) is shown in bold; this coding portion starts at position 209 and ends at position 901. The transcript also has the following SNPs as listed in Table 16 (given according to their position on the nucleotide sequence, with the alternative nucleic acid listed; the last column indicates whether the SNP is known or not; the presence of known SNPs in variant protein T51958_PEA_{—}1_P35 (SEQ ID NO:1156) sequence provides support for the deduced sequence of this variant protein according to the present invention).

[3491] As noted above, cluster T51958 features 48 segment(s), which were listed in Table 2 above and for which the sequence(s) are given at the end of the application. These segment(s) are portions of nucleic acid sequence(s) which are described herein separately because they are of particular interest. A description of each segment according to the present invention is now provided.

[3492] Segment cluster T51958_PEA_{—}1_node_{—}0 (SEQ ID NO:1093) according to the present invention is supported by 21 libraries. The number of libraries was determined as previously described. This segment can be found in the following transcript(s): T51958_PEA_{—}1_T4 (SEQ ID NO:1081), T51958_PEA_{—}1_T5 (SEQ ID NO:1082), T51958_PEA_{—}1_T6 (SEQ ID NO:1083), T51958_PEA_{—}1_T8 (SEQ ID NO:1084), T51958_PEA_T12 (SEQ ID NO:1085), T51958_PEA_{—}1_T16 (SEQ ID NO:1086), T51958_PEA_{—}1_T33 (SEQ ID NO:1087), T51958_PEA_{—}1_T35 (SEQ ID NO:1088), T51958_PEA_{—}1_T37 (SEQ ID NO:1089), T51958_PEA_{—}1_T39(SEQ ID NO:1090), T51958_PEA_{—}1_T40(SEQ ID NO:1091) and T51958_PEA_{—}1_T41 (SEQ ID NO:1092). Table 17 below describes the starting and ending position of this segment on each transcript.

[3493] Segment cluster T51958_PEA_{—}1_node_{—}7 (SEQ ID NO:1094) according to the present invention is supported by 29 libraries. The number of libraries was determined as previously described. This segment can be found in the following transcript(s): T51958_PEA_{—}1_T4 (SEQ ID NO:1081), T51958_PEA_{—}1_T5 (SEQ ID NO:1082), T51958_PEA_{—}1_T6 (SEQ ID NO:1083), T51958_PEA_{—}1_T8 (SEQ ID NO:1084), T51958_PEA_{—}1_T12 (SEQ ID NO:1085), T51958_PEA_{—}1_T16 (SEQ ID NO:1086), T51958_PEA_{—}1_T33 (SEQ ID NO:1087), T51958_PEA_{—}1_T35 (SEQ ID NO:1088), T51958_PEA_{—}1_T37 (SEQ ID NO:1089), T51958_PEA_{—}1_T39(SEQ ID NO:1090) T51958_PEA_{—}1_T40(SEQ ID NO:1091) and T51958_PEA_{—}1_T41 (SEQ ID NO:1092). Table 18 below describes the starting and ending position of this segment on each transcript.

[3494] Segment cluster T51958_PEA_{—}1_node_{—}8 (SEQ ID NO:1095) according to the present invention is supported by 28 libraries. The number of libraries was determined as previously described. This segment can be found in the following transcript(s): T51958_PEA_{—}1_T4 (SEQ ID NO:1081), T51958_PEA_{—}1_T5 (SEQ ID NO:1082), T51958_PEA_{—}1_T6 (SEQ ID NO:1083), T51958_PEA_{—}1_T8 (SEQ ID NO:1084), T51958_PEA_{—}1_T12 (SEQ ID NO:1085), T51958_PEA_{—}1_T16 (SEQ ID NO:1086), T51958_PEA_{—}1_T33 (SEQ ID NO:1087), T51958_PEA_{—}1_T35 (SEQ ID NO:1088), T51958_PEA_{—}1_T37 (SEQ ID NO:1089), T51958_PEA_{—}1_T39 (SEQ ID NO:1090), T51958_PEA_{—}1_T40 (SEQ ID NO:1091) and T51958_PEA_{—}1_T41 (SEQ ID NO:1092). Table 19 below describes the starting and ending position of this segment on each transcript.

[3495] Segment cluster T51958_PEA_{—}1_node_{—}9 (SEQ ID NO:1096) according to the present invention is supported by 4 libraries. The number of libraries was determined as previously described. This segment can be found in the following transcript(s): T51958_PEA_{—}1_T40 (SEQ ID NO:1091). Table 20 below describes the starting and ending position of this segment on each transcript.

[3496] Segment cluster T51958_PEA_{—}1_node_{—}14 (SEQ ID NO:1097) according to the present invention is supported by 27 libraries. The number of libraries was determined as previously described. This segment can be found in the following transcript(s): T51958_PEA_{—}1_T4 (SEQ ID NO:1081), T51958_PEA_{—}1_T5 (SEQ ID NO:1082), T51958_PEA_{—}1_T6 (SEQ ID NO:1083), T51958_PEA_{—}1_T12(SEQ ID NO:1085), T51958_PEA_{—}1_T16(SEQ ID NO:1086), T51958_PEA_{—}1_T33 (SEQ ID NO:1087), T51958_PEA_{—}1_T35 (SEQ ID NO:1088), T51958_PEA_{—}1_T37 (SEQ ID NO:1089), T51958_PEA_{—}1_T39 (SEQ ID NO:1090) and T51958_PEA_{—}1_T41 (SEQ ID NO:1092). Table 21 below describes the starting and ending position of this segment on each transcript.

[3497] Segment cluster T51958_PEA_{—}1_node_{—}16 (SEQ ID NO:1098) according to the present invention is supported by 25 libraries. The number of libraries was determined as previously described. This segment can be found in the following transcript(s): T51958_PEA_{—}1_T4 (SEQ ID NO:1081), T51958_PEA_{—}1_T5 (SEQ ID NO:1082), T51958_PEA_{—}1_T6 (SEQ ID NO:1083), T51958_PEA_{—}1_T8(SEQ ID NO:1084), T51958_PEA_{—}1_T12(SEQ ID NO:1085), T51958_PEA_{—}1_T16(SEQ ID NO:1086), T51958_PEA_{—}1_T33(SEQ ID NO:1087), T51958_PEA_{—}1_T35 (SEQ ID NO:1088), T51958_PEA_{—}1_T37 (SEQ ID NO:1089), T51958_PEA_{—}1_T39 (SEQ ID NO:1090) and T51958_PEA_{—}1_T41 (SEQ ID NO:1092). Table 22 below describes the starting and ending position of this segment on each transcript.

[3498] Segment cluster T51958_PEA_{—}1_node_{—}18 (SEQ ID NO:1099) according to the present invention is supported by 26 libraries. The number of libraries was determined as previously described. This segment can be found in the following transcript(s): T51958_PEA_{—}1_T4 (SEQ ID NO:1081), T51958_PEA_{—}1_T5 (SEQ ID NO:1082), T51958_PEA_{—}1_T6 (SEQ ID NO:1083), T51958_PEA_{—}1_T8 (SEQ ID NO:1084), T51958_PEA_{—}1_T12 (SEQ ID NO:1085), T51958_PEA_{—}1_T16 (SEQ ID NO:1086), T51958_PEA_{—}1_T33 (SEQ ID NO:1087), T51958_PEA_{—}1_T35 (SEQ ID NO:1088), T51958_PEA_{—}1_T37 (SEQ ID NO:1089), T51958_PEA_{—}1_T39 (SEQ ID NO:1090) and T51958_PEA_{—}1_T41 (SEQ ID NO:1092). Table 23 below describes the starting and ending position of this segment on each transcript.

[3499] Segment cluster T51958_PEA_{—}1_node_{—}21 (SEQ ID NO:1100) according to the present invention is supported by 29 libraries. The number of libraries was determined as previously described. This segment can be found in the following transcript(s): T51958_PEA_{—}1_T4 (SEQ ID NO:1081), T51958_PEA_{—}1_T5 (SEQ ID NO:1082), T51958_PEA_{—}1_T6 (SEQ ID NO:1083), T51958_PEA_{—}1_T8 (SEQ ID NO:1084), T51958_PEA_{—}1_T12 (SEQ ID NO:1085), T51958_PEA_{—}1_T16 (SEQ ID NO:1086), T51958_PEA_{—}1_T33 (SEQ ID NO:1087), T51958_PEA_{—}1_T35 (SEQ ID NO:1088), T51958_PEA_{—}1_T37 (SEQ ID NO:1089), T51958_PEA_{—}1_T39 (SEQ ID NO:1090) and T51958_PEA_{—}1_T41 (SEQ ID NO:1092). Table 24 below describes the starting and ending position of this segment on each transcript.

[3500] Segment cluster T51958_PEA_{—}1_node_{—}22 (SEQ ID NO:1101) according to the present invention is supported by 5 libraries. The number of libraries was determined as previously described. This segment can be found in the following transcript(s): T51958_PEA_{—}1_T37 (SEQ ID NO:1089) and T51958_PEA_{—}1_T39 (SEQ ID NO:1090). Table 25 below describes the starting and ending position of this segment on each transcript.

[3501] Segment cluster T51958_PEA_{—}1_node_{—}24 (SEQ ID NO:1102) according to the present invention is supported by 34 libraries. The number of libraries was determined as previously described. This segment can be found in the following transcript(s): T51958_PEA_{—}1_T4 (SEQ ID NO:1081), T51958_PEA_{—}1_T5 (SEQ ID NO:1082), T51958_PEA_{—}1_T6 (SEQ ID NO:1083), T51958_PEA_{—}1_T8 (SEQ ID NO:1084), T51958_PEA_{—}1_T12 (SEQ ID NO:1085), T51958_PEA_{—}1_T16 (SEQ ID NO:1086), T51958_PEA_{—}1_T33 (SEQ ID NO:1087), T51958_PEA_{—}1_T35 (SEQ ID NO:1088) and T51958_PEA_{—}1_T41 (SEQ ID NO:1092). Table 26 below describes the starting and ending position of this segment on each transcript.

[3502] Segment cluster T51958_PEA_{—}1_node_{—}27 (SEQ ID NO:1103) according to the present invention is supported by 33 libraries. The number of libraries was determined as previously described. This segment can be found in the following transcript(s): T51958_PEA_{—}1_T4 (SEQ ID NO:1081), T51958_PEA_{—}1_T5 (SEQ ID NO:1082), T51958_PEA_{—}1_T6 (SEQ ID NO:1083), T51958_PEA_{—}1_T8 (SEQ ID NO:1084), T51958_PEA_{—}1_T12 (SEQ ID NO:1085), T51958_PEA_{—}1_T16 (SEQ ID NO:1086), T51958_PEA_{—}1_T33 (SEQ ID NO:1087), T51958_PEA_{—}1_T35 (SEQ ID NO:1088) and T51958_PEA_{—}1_T41 (SEQ ID NO:1092). Table 27 below describes the starting and ending position of this segment on each transcript.

[3503] Segment cluster T51958_PEA_{—}1_node_{—}29 (SEQ ID NO:1104) according to the present invention is supported by 37 libraries. The number of libraries was determined as previously described. This segment can be found in the following transcript(s): T51958_PEA_{—}1_T4 (SEQ ID NO:1081), T51958_PEA_{—}1_T5(SEQ ID NO:1082), T51958_PEA_{—}1_T6(SEQ ID NO:1083), T51958_PEA_{—}1_T8(SEQ ID NO:1084), T51958_PEA_{—}1_T12 (SEQ ID NO:1085), T51958_PEA_{—}1_T16(SEQ ID NO:1086), T51958_PEA_{—}1_T33(SEQ ID NO:1087) and T51958_PEA_{—}1_T35 (SEQ ID NO:1088). Table 28 below describes the starting and ending position of this segment on each transcript.

[3504] Segment cluster T51958_PEA_{—}1_node_{—}33 (SEQ ID NO:1105) according to the present invention is supported by 37 libraries. The number of libraries was determined as previously described. This segment can be found in the following transcript(s): T51958_PEA_{—}1_T4 (SEQ ID NO:1081), T51958_PEA_{—}1_T5(SEQ ID NO:1082), T51958_PEA_{—}1_T6(SEQ ID NO:1083), T51958_PEA_{—}1_T8(SEQ ID NO:1084), T51958_PEA_{—}1_T12(SEQ ID NO:1085), T51958_PEA_{—}1_T16 (SEQ ID NO:1086), T51958_PEA_{—}1_T33 (SEQ ID NO:1087), T51958_PEA_{—}1_T35 (SEQ ID NO:1088) and T51958_PEA_{—}1_T41 (SEQ ID NO:1092). Table 29 below describes the starting and ending position of this segment on each transcript.

[3505] Segment cluster T51958_PEA_{—}1_node_{—}40 (SEQ ID NO:1106) according to the present invention is supported by 13 libraries. The number of libraries was determined as previously described. This segment can be found in the following transcript(s): T51958_PEA_{—}1_T4 (SEQ ID NO:1081), T51958_PEA_{—}1_T5 (SEQ ID NO:1082), T51958_PEA_{—}1_T12 (SEQ ID NO:1085), T51958_PEA_{—}1_T16 (SEQ ID NO:1086), T51958_PEA_{—}1_T33 (SEQ ID NO:1087) and T51958_PEA_{—}1_T35 (SEQ ID NO:1088). Table 30 below describes the starting and ending position of this segment on each transcript.

[3506] Segment cluster T51958_PEA_{—}1_node_{—}41 (SEQ ID NO:1107) according to the present invention is supported by 12 libraries. The number of libraries was determined as previously described. This segment can be found in the following transcript(s): T51958_PEA_{—}1_T4 (SEQ ID NO:1081), T51958_PEA_{—}1_T5(SEQ ID NO:1082), T51958_PEA_{—}1_T12 (SEQ ID NO:1085), T51958_PEA_{—}1_T16 (SEQ ID NO:1086) and T51958_PEA_{—}1_T33 (SEQ ID NO:1087). Table 31 below describes the starting and ending position of this segment on each transcript.

[3507] Segment cluster T51958_PEA_{—}1_node_{—}46 (SEQ ID NO:1108) according to the present invention is supported by 15 libraries. The number of libraries was determined as previously described. This segment can be found in the following transcript(s): T51958_PEA_{—}1_T12 (SEQ ID NO:1085), T51958_PEA_{—}1_T16 (SEQ ID NO:1086) and T51958_PEA_{—}1_T33 (SEQ ID NO:1087). Table 32 below describes the starting and ending position of this segment on each transcript.

[3508] Segment cluster T51958_PEA_{—}1_node_{—}51 (SEQ ID NO:1109) according to the present invention is supported by 2 libraries. The number of libraries was determined as previously described. This segment can be found in the following transcript(s): T51958_PEA_{—}1_T33 (SEQ ID NO:1087). Table 33 below describes the starting and ending position of this segment on each transcript.

[3509] Segment cluster T51958_PEA_{—}1_node_{—}55 (SEQ ID NO:1110) according to the present invention is supported by 82 libraries. The number of libraries was determined as previously described. This segment can be found in the following transcript(s): T51958_PEA_{—}1_T4 (SEQ ID NO:1081), T51958_PEA_{—}1_T5 (SEQ ID NO:1082), T51958_PEA_{—}1_T6 (SEQ ID NO:1083), T51958_PEA_{—}1_T8 (SEQ ID NO:1084), T51958_PEA_{—}1_T12 (SEQ ID NO:1085) and T51958_PEA_{—}1_T41 (SEQ ID NO:1092). Table 34 below describes the starting and ending position of this segment on each transcript.

[3510] Segment cluster T51958_PEA_{—}1_node_{—}67 (SEQ ID NO:1111) according to the present invention is supported by 81 libraries. The number of libraries was determined as previously described. This segment can be found in the following transcript(s): T51958_PEA_{—}1_T4 (SEQ ID NO:1081), T51958_PEA_{—}1_T5 (SEQ ID NO:1082), T51958_PEA_{—}1_T6 (SEQ ID NO:1083), T51958_PEA_{—}1_T8 (SEQ ID NO:1084), T51958_PEA_{—}1_T12 (SEQ ID NO:1085), T51958_PEA_{—}1_T16 (SEQ ID NO:1086) and T51958_PEA_{—}1_T41 (SEQ ID NO:1092). Table 35 below describes the starting and ending position of this segment on each transcript.

[3511] Segment cluster T51958_PEA_{—}1_node_{—}70 (SEQ ID NO:1112) according to the present invention is supported by 85 libraries. The number of libraries was determined as previously described. This segment can be found in the following transcript(s): T51958_PEA_{—}1_T4 (SEQ ID NO:1081), T51958_PEA_{—}1_T5(SEQ ID NO:1082), T51958_PEA_{—}1_T6(SEQ ID NO:1083), T51958_PEA_{—}1_T8 (SEQ ID NO:1084), T51958_PEA_{—}1_T12 (SEQ ID NO:1085), T51958_PEA_{—}1_T16 (SEQ ID NO:1086) and T51958_PEA_{—}1_T41 (SEQ ID NO:1092). Table 36 below describes the starting and ending position of this segment on each transcript.

[3512] Segment cluster T51958_PEA_{—}1_node_{—}74 (SEQ ID NO:1113) according to the present invention is supported by 191 libraries. The number of libraries was determined as previously described. This segment can be found in the following transcript(s): T51958_PEA_{—}1_T4 (SEQ ID NO:1081), T51958_PEA_{—}1_T5 (SEQ ID NO:1082), T51958_PEA_{—}1_T6 (SEQ ID NO:1083), T51958_PEA_{—}1_T8 (SEQ ID NO:1084), T51958_PEA_{—}1_T12 (SEQ ID NO:1085), T51958_PEA_{—}1_T16 (SEQ ID NO:1086) and T51958_PEA_{—}1_T41 (SEQ ID NO:1092). Table 37 below describes the starting and ending position of this segment on each transcript.

[3513] Segment cluster T51958_PEA_{—}1_node_{—}78 (SEQ ID NO:1114) according to the present invention is supported by 115 libraries. The number of libraries was determined as previously described. This segment can be found in the following transcript(s): T51958_PEA_{—}1_T4 (SEQ ID NO:1081), T51958_PEA_{—}1_T5 (SEQ ID NO:1082), T51958_PEA_{—}1_T6 (SEQ ID NO:1083), T51958_PEA_{—}1_T8 (SEQ ID NO:1084), T51958_PEA_{—}1_T12 (SEQ ID NO:1085), T51958_PEA_{—}1_T16(SEQ ID NO:1086) and T51958_PEA_{—}1_T41(SEQ ID NO:1092). Table 38 below describes the starting and ending position of this segment on each transcript.

[3514] According to an optional embodiment of the present invention, short segments related to the above cluster are also provided. These segments are up to about 120 bp in length, and so are included in a separate description.

[3515] Segment cluster T51958_PEA_{—}1_node_{—}11 (SEQ ID NO:1115) according to the present invention is supported by 23 libraries. The number of libraries was determined as previously described. This segment can be found in the following transcript(s): T51958_PEA_{—}1_T4 (SEQ ID NO:1081), T51958_PEA_{—}1_T5 (SEQ ID NO:1082), T51958_PEA_{—}1_T6 (SEQ ID NO:1083), T51958_PEA_{—}1_T8 (SEQ ID NO:1084), T51958_PEA_T12 (SEQ ID NO:1085), T51958_PEA_{—}1_T16 (SEQ ID NO:1086), T51958_PEA_{—}1_T33 (SEQ ID NO:1087), T51958_PEA_{—}1_T35 (SEQ ID NO:1088), T51958_PEA_{—}1_T37 (SEQ ID NO:1089), T51958_PEA_{—}1_T39 (SEQ ID NO:1090) and T51958_PEA_{—}1_T41 (SEQ ID NO:1092). Table 39 below describes the starting and ending position of this segment on each transcript.

[3516] Segment cluster T51958_PEA_{—}1_node_{—}15 (SEQ ID NO:1116) according to the present invention is supported by 2 libraries. The number of libraries was determined as previously described. This segment can be found in the following transcript(s): T51958_PEA_{—}1_T6 (SEQ ID NO:1083) and T51958_PEA_{—}1_T41 (SEQ ID NO:1092). Table 40 below describes the starting and ending position of this segment on each transcript.

[3517] Segment cluster T51958_PEA_{—}1_node_{—}20 (SEQ ID NO:1117) according to the present invention is supported by 25 libraries. The number of libraries was determined as previously described. This segment can be found in the following transcript(s): T51958_PEA_{—}1_T4 (SEQ ID NO:1081), T51958_PEA_{—}1_T5 (SEQ ID NO:1082), T51958_PEA_{—}1_T6 (SEQ ID NO:1083), T51958_PEA_{—}1_T8 (SEQ ID NO:1084), T51958_PEA_{—}1_T12 (SEQ ID NO:1085), T51958_PEA_T16 (SEQ ID NO:1086), T51958_PEA_{—}1_T33 (SEQ ID NO:1087), T51958_PEA_{—}1_T35 (SEQ ID NO:1088), T51958_PEA_{—}1_T37 (SEQ ID NO:1089), T51958_PEA_{—}1_T39 (SEQ ID NO:1090) and T51958_PEA_{—}1_T41 (SEQ ID NO:1092). Table 41 below describes the starting and ending position of this segment on each transcript.

[3518] Segment cluster T51958_PEA_{—}1_node_{—}26 (SEQ ID NO:1118) according to the present invention can be found in the following transcript(s): T51958_PEA_{—}1_T4 (SEQ ID NO:1081), T51958_PEA_{—}1_T5 (SEQ ID NO:1082), T51958_PEA_{—}1_T6 (SEQ ID NO:1083), T51958_PEA_{—}1_T8 (SEQ ID NO:1084), T51958_PEA_{—}1_T12 (SEQ ID NO:1085), T51958_PEA_{—}1_T16 (SEQ ID NO:1086), T51958_PEA_{—}1_T33 (SEQ ID NO:1087), T51958_PEA_{—}1_T35 (SEQ ID NO:1088) and T51958_PEA_{—}1_T41 (SEQ ID NO:1092). Table 42 below describes the starting and ending position of this segment on each transcript.

[3519] Segment cluster T51958_PEA_{—}1_node_{—}35 (SEQ ID NO:1119) according to the present invention is supported by 41 libraries. The number of libraries was determined as previously described. This segment can be found in the following transcript(s): T51958_PEA_{—}1_T4 (SEQ ID NO:1081), T51958_PEA_{—}1_T5 (SEQ ID NO:1082), T51958_PEA_{—}1_T6 (SEQ ID NO:1083), T51958_PEA_{—}1_T8 (SEQ ID NO:1084), T51958_PEA_{—}1_T12 (SEQ ID NO:1085), T51958_PEA_{—}1_T16 (SEQ ID NO:1086), T51958_PEA_{—}1_T33 (SEQ ID NO:1087), T51958_PEA_{—}1_T35 (SEQ ID NO:1088) and T51958_PEA_{—}1_T41 (SEQ ID NO:1092). Table 43 below describes the starting and ending position of this segment on each transcript.

[3520] Segment cluster T51958_PEA_{—}1_node_{—}36 (SEQ ID NO:1120) according to the present invention is supported by 35 libraries. The number of libraries was determined as previously described. This segment can be found in the following transcript(s): T51958_PEA_{—}1_T4 (SEQ ID NO:1081), T51958_PEA_{—}1_T5(SEQ ID NO:1082), T51958_PEA_{—}1_T6(SEQ ID NO:1083), T51958_PEA_{—}1_T8 (SEQ ID NO:1084), T51958_PEA_{—}1_T12 (SEQ ID NO:1085), T51958_PEA_{—}1_T16 (SEQ ID NO:1086), T51958_PEA_{—}1_T33 (SEQ ID NO:1087), T51958_PEA_{—}1_T35 (SEQ ID NO:1088) and T51958_PEA_{—}1_T41 (SEQ ID NO:1092). Table 44 below describes the starting and ending position of this segment on each transcript.

[3521] Segment cluster T51958_PEA_{—}1_node_{—}38 (SEQ ID NO:1121) according to the present invention can be found in the following transcript(s): T51958_PEA_{—}1_T4 (SEQ ID NO:1081), T51958_PEA_{—}1_T6 (SEQ ID NO:1083), T51958_PEA_{—}1_T8 (SEQ ID NO:10841, T51958_PEA_{—}1_T12 (SEQ ID NO:1085), T51958_PEA_{—}1_T16 (SEQ ID NO:1086), T51958_PEA_{—}1_T33 (SEQ ID NO:1087), T51958_PEA_{—}1_T35 (SEQ ID NO:1088) and T51958_PEA_{—}1_T41 (SEQ ID NO:1092). Table 45 below describes the starting and ending position of this segment on each transcript.

[3522] Segment cluster T51958_PEA_{—}1_node_{—}39 (SEQ ID NO:1122) according to the present invention is supported by 40 libraries. The number of libraries was determined as previously described. This segment can be found in the following transcript(s): T51958_PEA_{—}1_T4 (SEQ ID NO:1081), T51958_PEA_{—}1_T5 (SEQ ID NO:1082), T51958_PEA_{—}1_T6 (SEQ ID NO:1083), T51958_PEA_{—}1_T8 (SEQ ID NO:1084), T51958_PEA_{—}1_T12 (SEQ ID NO:1085), T51958_PEA_{—}1_T16 (SEQ ID NO:1086), T51958_PEA_{—}1_T33 (SEQ ID NO:1087), T51958_PEA_{—}1_T35 (SEQ ID NO:1088) and T51958_PEA_{—}1_T41 (SEQ ID NO:1092). Table 46 below describes the starting and ending position of this segment on each transcript.

[3523] Segment cluster T51958_PEA_{—}1_node_{—}42 (SEQ ID NO:1123) according to the present invention can be found in the following transcript(s): T51958_PEA_{—}1_T4 (SEQ ID NO:1081), T51958_PEA_{—}1_T5 (SEQ ID NO:1082), T51958_PEA_{—}1_T6 (SEQ ID NO:1083), T51958_PEA_{—}1_T12(SEQ ID NO:1085) T51958_PEA_{—}1_T16(SEQ ID NO:1086), T51958_PEA_{—}1_T33 (SEQ ID NO:1087) and T51958_PEA_{—}1_T41 (SEQ ID NO:1092). Table 47 below describes the starting and ending position of this segment on each transcript.

[3524] Segment cluster T51958_PEA_{—}1_node_{—}43 (SEQ ID NO:1124) according to the present invention is supported by 50 libraries. The number of libraries was determined as previously described. This segment can be found in the following transcript(s): T51958_PEA_{—}1_T4 (SEQ ID NO:1081), T51958_PEA_{—}1_T5 (SEQ ID NO:1082), T51958_PEA_{—}1_T6 (SEQ ID NO:10831, T51958_PEA_{—}1_T8 (SEQ ID NO:1084), T51958_PEA_{—}1_T12 (SEQ ID NO:1085), T51958_PEA_{—}1_T16(SEQ ID NO:1086), T51958_PEA_{—}1_T33(SEQ ID NO:1087) and T51958_PEA_{—}1_T41 (SEQ ID NO:1092). Table 48 below describes the starting and ending position of this segment on each transcript.

[3525] Segment cluster T51958_PEA_{—}1_node_{—}44 (SEQ ID NO:1125) according to the present invention is supported by 57 libraries. The number of libraries was determined as previously described. This segment can be found in the following transcript(s): T51958_PEA_{—}1_T4 (SEQ ID NO:1081), T51958_PEA_{—}1_T5 (SEQ ID NO:1082), T51958_PEA_{—}1_T6 (SEQ ID NO:1083), T51958_PEA_{—}1_T8 (SEQ ID NO:1084), T51958_PEA_{—}1_T12 (SEQ ID NO:1085), T51958_PEA_{—}1_T16 (SEQ ID NO:1086), T51958_PEA_{—}1_T33 (SEQ ID NO:1087) and T51958_PEA_{—}1_T41 (SEQ ID NO:1092). Table 49 below describes the starting and ending position of this segment on each transcript.

[3526] Segment cluster T51958_PEA_{—}1_node_{—}45 (SEQ ID NO:1126) according to the present invention can be found in the following transcript(s): T51958_PEA_{—}1_T4 (SEQ ID NO:1081), T51958_PEA_{—}1_T5 (SEQ ID NO:1082), T51958_PEA_{—}1_T6 (SEQ ID NO:1083), T51958_PEA_{—}1_T8 (SEQ ID NO:1084), T51958_PEA_{—}1_T12 (SEQ ID NO:1085), T51958_PEA_{—}1_T16(SEQ ID NO:1086), T51958_PEA_{—}1_T33(SEQ ID NO:1087) and T51958_PEA_{—}1_T41 (SEQ ID NO:1092). Table 50 below describes the starting and ending position of this segment on each transcript.

[3527] Segment cluster T51958_PEA_{—}1_node_{—}47 (SEQ ID NO:1127) according to the present invention is supported by 65 libraries. The number of libraries was determined as previously described. This segment can be found in the following transcript(s): T51958_PEA_{—}1_T4 (SEQ ID NO:1081), T51958_PEA_{—}1_T5 (SEQ ID NO:1082), T51958_PEA_{—}1_T6 (SEQ ID NO:1083), T51958_PEA_{—}1_T8 (SEQ ID NO:1084), T51958_PEA_{—}1_T12 (SEQ ID NO:1085), T51958_PEA_{—}1_T16(SEQ ID NO:1086), T51958_PEA_{—}1_T33(SEQ ID NO:1087) and T51958_PEA_{—}1_T41 (SEQ ID NO:1092). Table 51 below describes the starting and ending position of this segment on each transcript.

[3528] Segment cluster T51958_PEA_{—}1_node_{—}48 (SEQ ID NO:1128) according to the present invention is supported by 68 libraries. The number of libraries was determined as previously described. This segment can be found in the following transcript(s): T51958_PEA_{—}1_T4 (SEQ ID NO:1081), T51958_PEA_{—}1_T5 (SEQ ID NO:1082), T51958_PEA_{—}1_T6 (SEQ ID NO:1083), T51958_PEA_{—}1_T8(SEQ ID NO:1084), T51958_PEA_{—}1_T12(SEQ ID NO:1085), T51958_PEA_{—}1_T16 (SEQ ID NO:1086), T51958_PEA_{—}1_T33 (SEQ ID NO:1087) and T51958_PEA_{—}1_T41 (SEQ ID NO:1092). Table 52 below describes the starting and ending position of this segment on each transcript.

[3529] Segment cluster T51958_PEA_{—}1_node_{—}49 (SEQ ID NO:1129) according to the present invention is supported by 70 libraries. The number of libraries was determined as previously described. This segment can be found in the following transcript(s): T51958_PEA_{—}1_T4 (SEQ ID NO:1081), T51958_PEA_{—}1_T5 (SEQ ID NO:1082), T51958_PEA_{—}1_T6 (SEQ ID NO:1083), T51958_PEA_{—}1_T8 (SEQ ID NO:1084), T51958_PEA_{—}1_T12 (SEQ ID NO:1085), T51958_PEA_{—}1_T16 (SEQ ID NO:1086), T51958_PEA_{—}1_T33 (SEQ ID NO:1087) and T51958_PEA_{—}1_T41 (SEQ ID NO:1092). Table 53 below describes the starting and ending position of this segment on each transcript.

[3530] Segment cluster T51958_PEA_{—}1_node_{—}50 (SEQ ID NO:1130) according to the present invention can be found in the following transcript(s): T51958_PEA_{—}1_T4 (SEQ ID NO:1081), T51958_PEA_{—}1_T5(SEQ ID NO:1082), T51958_PEA_{—}1_T6(SEQ ID NO:1083), T51958_PEA_{—}1_T8 (SEQ ID NO:1084), T51958_PEA_{—}1_T12 (SEQ ID NO:1085), T51958_PEA_{—}1_T16(SEQ ID NO:1086) T51958_PEA_{—}1_T33(SEQ ID NO:1087) and T51958_PEA_{—}1_T41 (SEQ ID NO:1092). Table 54 below describes the starting and ending position of this segment on each transcript.

[3531] Segment cluster T51958_PEA_{—}1_node_{—}54 (SEQ ID NO:1131) according to the present invention can be found in the following transcript(s): T51958_PEA_{—}1_T4 (SEQ ID NO:1081), T51958_PEA_{—}1_T5 (SEQ ID NO:1082), T51958_PEA_{—}1_T6 (SEQ ID NO:1083), T51958_PEA_{—}1_T8(SEQ ID NO:1084), T51958_PEA_{—}1_T12(SEQ ID NO:1085) and T51958_PEA_{—}1_T41 (SEQ ID NO:1092). Table 55 below describes the starting and ending position of this segment on each transcript.

[3532] Segment cluster T51958_PEA_{—}1_node_{—}61 (SEQ ID NO:1132) according to the present invention is supported by 72 libraries. The number of libraries was determined as previously described. This segment can be found in the following transcript(s): T51958_PEA_{—}1_T4 (SEQ ID NO:1081), T51958_PEA_{—}1_T5 (SEQ ID NO:1082), T51958_PEA_{—}1_T6 (SEQ ID NO:1083), T51958_PEA_{—}1_T8 (SEQ ID NO:1084), T51958_PEA_{—}1_T12 (SEQ ID NO:1085), T51958_PEA_{—}1_T16 (SEQ ID NO:1086) and T51958_PEA_{—}1_T41 (SEQ ID NO:1092). Table 56 below describes the starting and ending position of this segment on each transcript.

[3533] Segment cluster T51958_PEA_{—}1_node_{—}71 (SEQ ID NO:1133) according to the present invention is supported by 80 libraries. The number of libraries was determined as previously described. This segment can be found in the following transcript(s): T51958_PEA_{—}1_T4 (SEQ ID NO:1081), T51958_PEA_{—}1_T5 (SEQ ID NO:1082), T51958_PEA_{—}1_T6 (SEQ ID NO:1083), T51958_PEA_{—}1_T8 (SEQ ID NO:1084), T51958_PEA_{—}1_T12 (SEQ ID NO:1085), T51958_PEA_{—}1_T16 (SEQ ID NO:1086) and T51958_PEA_{—}1_T41 (SEQ ID NO:1092). Table 57 below describes the starting and ending position of this segment on each transcript.

[3534] Segment cluster T51958_PEA_{—}1_node_{—}72 (SEQ ID NO:1134) according to the present invention can be found in the following transcript(s): T51958_PEA_{—}1_T4 (SEQ ID NO:1081), T51958_PEA_{—}1_T5 (SEQ ID NO:1082), T51958_PEA_{—}1_T6 (SEQ ID NO:1083), T51958_PEA_{—}1_T8(SEQ ID NO:1084), T51958_PEA_{—}1_T12(SEQ ID NO:1085), T51958_PEA_{—}1_T16 (SEQ ID NO:1086) and T51958_PEA_{—}1_T41 (SEQ ID NO:1092). Table 58 below describes the starting and ending position of this segment on each transcript.

[3535] Segment cluster T51958_PEA_{—}1_node_{—}75 (SEQ ID NO:1135) according to the present invention can be found in the following transcript(s): T51958_PEA_{—}1_T4 (SEQ ID NO:1081), T51958_PEA_{—}1_T5 (SEQ ID NO:1082), T51958_PEA_{—}1_T6 (SEQ ID NO:1083), T51958_PEA_{—}1_T8 (SEQ ID NO:1084), T51958_PEA_{—}1_T12 (SEQ ID NO:1085), T51958_PEA_{—}1_T16(SEQ ID NO:1086) and T51958_PEA_{—}1_T41 (SEQ ID NO:1092). Table 59 below describes the starting and ending position of this segment on each transcript.

[3536] Segment cluster T51958_PEA_{—}1_node_{—}76 (SEQ ID NO:1136) according to the present invention can be found in the following transcript(s): T51958_PEA_{—}1_T4 (SEQ ID NO:1081), T51958_PEA_{—}1_T5 (SEQ ID NO:1082), T51958_PEA_{—}1_T6 (SEQ ID NO:1083), T51958_PEA_{—}1_T8 (SEQ ID NO:1084), T51958_PEA_{—}1_T12 (SEQ ID NO:1085), T51958_PEA_{—}1_T16 (SEQ ID NO:1086) and T51958_PEA_{—}1_T41 (SEQ ID NO:1092). Table 60 below describes the starting and ending position of this segment on each transcript.

[3537] Segment cluster T51958_PEA_{—}1_node_{—}77 (SEQ ID NO:1137) according to the present invention can be found in the following transcript(s): T51958_PEA_{—}1_T4 (SEQ ID NO:1081), T51958_PEA_{—}1_T5 (SEQ ID NO:1082), T51958_PEA_{—}1_T6 (SEQ ID NO:1083), T51958_PEA_{—}1_T8 (SEQ ID NO:1084), T51958_PEA_{—}1_T12 (SEQ ID NO:1085), T51958_PEA_{—}1_T16 (SEQ ID NO:1086) and T51958_PEA_{—}1_T41 (SEQ ID NO:1092). Table 61 below describes the starting and ending position of this segment on each transcript.

[3538] Segment cluster T51958_PEA_{—}1_node_{—}80 (SEQ ID NO:1138) according to the present invention is supported by 1 libraries. The number of libraries was determined as previously described. This segment can be found in the following transcript(s): T51958_PEA_{—}1_T35 (SEQ ID NO:1088). Table 62 below describes the starting and ending position of this segment on each transcript.

[3539] Segment cluster T51958_PEA_{—}1_node_{—}82 (SEQ ID NO:1139) according to the present invention is supported by 1 libraries. The number of libraries was determined as previously described. This segment can be found in the following transcript(s): T51958_PEA_{—}1_T35 (SEQ ID NO:1088). Table 63 below describes the starting and ending position of this segment on each transcript.

[3540] Segment cluster T51958_PEA_{—}1_node_{—}84 (SEQ ID NO:1140) according to the present invention is supported by 1 libraries. The number of libraries was determined as previously described. This segment can be found in the following transcript(s): T51958_PEA_{—}1_T35 (SEQ ID NO:1088). Table 64 below describes the starting and ending position of this segment on each transcript.

Variant protein alignment to the previously known protein:

Sequence name: PTK7_HUMAN_V4 (SEQ ID NO:1143)

Sequence Documentation:

Alignment of: T51958_PEA_{—}1_P5 (SEQ ID NO:1151)×PTK7_HUMAN_V4 (SEQ ID NO:1143) ••

Alignment segment 1/1:

Alignment:

Sequence name: PTK7_HUMAN_V4 (SEQ ID NO:1143)

Sequence Documentation:

Alignment of: T51958_PEA_{—}1_P6 (SEQ ID NO:1152)×PTK7_HUMAN_V4 (SEQ ID NO:1143) ••

Alignment segment 1/1:

Alignment:

Sequence name: PTK7_HUMAN_V11 (SEQ ID NO:1144)

Sequence Documentation:

Alignment of: T51958_PEA_{—}1_P28 (SEQ ID NO:1153) x PTK7_HUMAN_V11 (SEQ ID NO:1144) ••

Alignment segment 1/1:

Alignment:

Sequence name: Q8NFA5 (SEQ ID NO:1147)

Sequence Documentation:

Alignment of: T51958_PEA_{—}1_P28 (SEQ ID NO:1153)×Q8NFA5 (SEQ ID NO:1147) ••

Alignment segment 1/1:

Alignment:

Sequence name: Q8NFA6 (SEQ ID NO:1149)

Sequence Documentation:

Alignment of: T51958_PEA_{—}1_P28 (SEQ ID NO:1153)×Q8NFA6 (SEQ ID NO:1149) ••

Alignment segment 1/1:

Alignment:

Sequence name: Q8NFA7 (SEQ ID NO:1148)

Sequence Documentation:

Alignment of: T51958_PEA_{—}1_P28 (SEQ ID NO:1153)×Q8NFA7 (SEQ ID NO:1148) ••

Alignment segment 1/1:

Alignment:

Sequence name: Q8NFA8 (SEQ ID NO:1146)

Sequence Documentation:

Alignment of: T51958_PEA_{—}1_P28 (SEQ ID NO:1153)×Q8NFA8 (SEQ ID NO:1146) ••

Alignment segment 1/1:

Alignment:

Sequence name: AAN04862 (SEQ ID NO:1150)

Sequence Documentation:

Alignment of: T51958_PEA_{—}1_P28 (SEQ ID NO:1153)×AAN04862 (SEQ ID NO:1150) ••

Alignment segment 1/1:

Alignment:

Sequence name: PTK7_HUMAN_V13 (SEQ ID NO:1145)

Sequence Documentation:

Alignment of: T51958_PEA_{—}1_P30 (SEQ ID NO:1154) x PTK7_HUMAN_V13 (SEQ ID NO:1145) ••

Alignment segment 1/1:

Alignment:

Sequence name: PTK7_HUMAN_V3 (SEQ ID NO:1142)

Sequence Documentation:

Alignment of: T51958_PEA_{—}1_P34 (SEQ ID NO:1155)×PTK7_HUMAN_V3 (SEQ ID NO:1142) ••

Alignment segment 1/1:

Alignment:

Sequence name: PTK7_HUMAN_μl (SEQ ID NO:1144)

Sequence Documentation:

Alignment of: T51958_PEA_{—}1_P35 (SEQ ID NO:1156) x PTK7_HUMAN_V11 (SEQ ID NO:1144).

Alignment segment 1/1:

Alignment:

[3541] Expression of Homo sapiens PTK7 protein tyrosine kinase 7 (PTK7) T51958 transcripts which are detectable by amplicon as depicted in sequence name T51958seg38 (SEQ ID NO: 1369) in normal and cancerous colon tissues

[3542] Expression of Homo sapiens PTK7 protein tyrosine kinase 7 (PTK7) transcripts detectable by or according to seg38, T51958seg38 amplicon (SEQ ID NO:1369) and T51958 seg38F (SEQ ID NO:1367) and T51958seg38R (SEQ ID NO:1368) primers was measured by real time PCR. In parallel the expression of four housekeeping genes—PBGD (GenBank Accession No. BC019323 (SEQ ID NO:1576); amplicon—PBGD-amplicon, SEQ ID NO:531), HPRT1 (GenBank Accession No. NM_{—}000194 (SEQ ID NO:1577); amplicon—HPRT1-amplicon, SEQ ID NO:612), G6PD (GenBank Accession No. NM_{—}000402 (SEQ ID NO:1578); G6PD amplicon, SEQ ID NO:615), RPS27A (GenBank Accession No. NM_{—}002954 (SEQ ID NO:1579); RPS27A amplicon, SEQ ID NO:1261), was measured similarly. For each RT sample, the expression of the above amplicon was normalized to the geometric mean of the quantities of the housekeeping genes. The normalized quantity of each RT sample was then divided by the median of the quantities of the normal post-mortem (PM) samples (Sample Nos. 41, 52, 62-67, 69-71, Table 1, above, “Tissue samples in testing panel”), to obtain a value of fold up-regulation for each sample relative to median of the normal PM samples.

[3543] FIG. 64 is a histogram showing over expression of the above-indicated Homo sapiens PTK7 protein tyrosine kinase 7 (PTK7) transcripts in cancerous colon samples relative to the normal samples. (Values represent the average of duplicate experiments. Error bars indicate the minimal and maximal values obtained.) The number and percentage of samples that exhibit at least 3 fold over-expression, out of the total number of samples tested is indicated in the bottom.

[3544] As is evident from FIG. 64, the expression of Homo sapiens PTK7 protein tyrosine kinase 7 (PTK7) transcripts detectable by the above amplicon in cancer samples was significantly higher than in the non-cancerous samples (Sample Nos 41, 52, 62-67, 69-71, Table 1, “Tissue samples in testing panel”). Notably an over-expression of at least 3 fold was found in 23 out of 37 adenocarcinoma samples, Statistical analysis was applied to verify the significance of these results, as described below.

[3545] The P value for the difference in the expression levels of Homo sapiens PTK7 protein tyrosine kinase 7 (PTK7) transcripts detectable by the above amplicon in colon cancer samples versus the normal tissue samples was determined by T test as 4.58E-04.

[3546] Threshold of 3 fold overexpression was found to differentiate between cancer and normal samples with P value of 1.97E-04 as checked by exact fisher test. The above values demonstrate statistical significance of the results.

[3547] Primer pairs are also optionally and preferably encompassed within the present invention; for example, for the above experiment, the following primer pair was used as a non-limiting illustrative example only of a suitable primer pair: T51958seg38F forward primer (SEQ ID NO:1367); and T51958seg38R reverse primer (SEQ ID NO:1368).

[3548] The present invention also preferably encompasses any amplicon obtained through the use of any suitable primer pair; for example, for the above experiment, the following amplicon was obtained as a non-limiting illustrative example only of a suitable amplicon: T51958seg38 (SEQ ID NO:1369).

[3549] Expression of Homo sapiens PTK7 protein tyrosine kinase 7 (PTK7) T51958 transcripts which are detectable by amplicon as depicted in sequence name T51958seg7(SEQ ID NO: 1372) in normal and cancerous colon tissues

[3550] Expression of Homo sapiens PTK7 protein tyrosine kinase 7 (PTK7) transcripts detectable by or according to seg7, T51958seg7 amplicon (SEQ ID NO:1372) and T51958 seg7F (SEQ ID NO:1370) and T51958seg7R (SEQ ID NO:1371) primers was measured by real time PCR. In parallel the expression of four housekeeping genes—PBGD (GenBank Accession No. BC019323 (SEQ ID NO:1576); amplicon—PBGD-amplicon, SEQ ID NO:531), HPRT1 (GenBank Accession No. NM_{—}000194 (SEQ ID NO:1577); amplicon—HPRT1-amplicon, SEQ ID NO:612), G6PD (GenBank Accession No. NM_{—}000402 (SEQ ID NO:1578); G6PD amplicon, SEQ ID NO:615), RPS27A (GenBank Accession No. NM_{—}002954 (SEQ ID NO:1579); RPS27A amplicon, SEQ ID NO:1261), was measured similarly. For each RT sample, the expression of the above amplicon was normalized to the geometric mean of the quantities of the housekeeping genes. The normalized quantity of each RT sample was then divided by the median of the quantities of the normal post-mortem (PM) samples (Sample Nos. 41, 52, 62-67, 69-71, Table 1, above, “Tissue samples in testing panel”), to obtain a value of fold up-regulation for each sample relative to median of the normal PM samples.

[3551] FIG. 65 is a histogram showing over expression of the above-indicated Homo sapiens PTK7 protein tyrosine kinase 7 (PTK7) transcripts in cancerous colon samples relative to the normal samples. (Values represent the average of duplicate experiments. Error bars indicate the minimal and maximal values obtained.) The number and percentage of samples that exhibit at least 3 fold over-expression, out of the total number of samples tested is indicated in the bottom.

[3552] As is evident from FIG. 65 the expression of Homo sapiens PTK7 protein tyrosine kinase 7 (PTK7) transcripts detectable by the above amplicon in cancer samples was significantly higher than in the non-cancerous samples (Sample Nos. 41, 52, 62-67, 69-71, Table 1, “Tissue samples in testing panel”). Notably an over-expression of at least 3 fold was found in 19 out of 37 adenocarcinoma samples,

[3553] Statistical analysis was applied to verify the significance of these results, as described below.

[3554] The P value for the difference in the expression levels of Homo sapiens PTK7 protein tyrosine kinase 7 (PTK7) transcripts detectable by the above amplicon in colon cancer samples versus the normal tissue samples was determined by T test as 1.74E-05.

[3555] Threshold of 3 fold overexpression was found to differentiate between cancer and normal samples with P value of 1.53E-03 as checked by exact fisher test. The above values demonstrate statistical significance of the results.

[3556] Primer pairs are also optionally and preferably encompassed within the present invention; for example, for the above experiment, the following primer pair was used as a non-limiting illustrative example only of a suitable primer pair: T51958seg7F forward primer (SEQ ID NO:1370); and T51958seg7R reverse primer (SEQ ID NO:1371).

[3557] The present invention also preferably encompasses any amplicon obtained through the use of any suitable primer pair; for example, for the above experiment, the following amplicon was obtained as a non-limiting illustrative example only of a suitable amplicon: T51958seg7 (SEQ ID NO:1372).

Description for Cluster Z17877

[3558] Cluster Z17877 features 9 transcript(s) and 17 segment(s) of interest, the names for which are given in Tables 1 and 2, respectively, the sequences themselves are given at the end of the application. The selected protein variants are given in table 3.

[3559] Cluster Z17877 can be used as a diagnostic marker according to overexpression of transcripts of this cluster in cancer. Expression of such transcripts in normal tissues is also given according to the previously described methods. The term “number” in the left hand column of the table and the numbers on the y-axis of the figure below refer to weighted expression of ESTs in each category, as “parts per million” (ratio of the expression of ESTs for a particular cluster to the expression of all ESTs in that category, according to parts per million).

[3560] Overall, the following results were obtained as shown with regard to the histograms in FIG. 66 and Table 4. This cluster is overexpressed (at least at a minimum level) in the following pathological conditions: brain malignant tumors and malignant tumors involving the bone marrow.

[3561] As noted above, cluster Z17877 features 9 transcript(s), which were listed in Table 1 above. A description of each variant protein according to the present invention is now provided.

[3562] Variant protein Z17877_PEA_{—}1_P1 (SEQ ID NO:1183) according to the present invention has an amino acid sequence as given at the end of the application; it is encoded by transcript(s) Z17877_PEA_{—}1_T0 (SEQ ID NO:1157). The location of the variant protein was determined according to results from a number of different software programs and analyses, including analyses from SignalP and other specialized programs. The variant protein is believed to be located as follows with regard to the cell: intracellularly. The protein localization is believed to be intracellularly because of manual inspection of known protein localization and/or gene structure.

[3563] Variant protein Z17877_PEA_{—}1_P1 (SEQ ID NO:1183) is encoded by the following transcript(s): Z17877_PEA_{—}1_T0 (SEQ ID NO:1157), for which the sequence(s) is/are given at the end of the application. The coding portion of transcript Z17877_PEA_{—}1_T0 (SEQ ID NO:1157) is shown in bold; this coding portion starts at position 1206 and ends at position 2522. The transcript also has the following SNPs as listed in Table 6 (given according to their position on the nucleotide sequence, with the alternative nucleic acid listed; the last column indicates whether the SNP is known or not; the presence of known SNPs in variant protein Z17877_PEA_{—}1_P1 (SEQ ID NO:1183) sequence provides support for the deduced sequence of this variant protein according to the present invention).

[3564] Variant protein Z17877_PEA_{—}1_P2 (SEQ ID NO:1184) according to the present invention has an amino acid sequence as given at the end of the application; it is encoded by transcript(s) Z17877_PEA_{—}1_T6 (SEQ ID NO:1161) and Z17877_PEA_{—}1_T11 (SEQ ID NO:1164). The location of the variant protein was determined according to results from a number of different software programs and analyses, including analyses from SignalP and other specialized programs. The variant protein is believed to be located as follows with regard to the cell: intracellularly. The protein localization is believed to be intracellularly because of manual inspection of known protein localization and/or gene structure.

[3565] Variant protein Z17877_PEA_{—}1_P2 (SEQ ID NO:1184) also has the following non-silent SNPs (Single Nucleotide Polymorphisms) as listed in Table 7, (given according to their position(s) on the amino acid sequence, with the alternative amino acid(s) listed; the last column indicates whether the SNP is known or not; the presence of known SNPs in variant protein Z17877_PEA_{—}1_P2 (SEQ ID NO:1184) sequence provides support for the deduced sequence of this variant protein according to the present invention).

[3566] Variant protein Z17877_PEA_{—}1_P2 (SEQ ID NO:1184) is encoded by the following transcript(s): Z17877_PEA_{—}1_T6 (SEQ ID NO:1161) and Z17877_PEA_{—}1_T11 (SEQ ID NO:1164), for which the sequence(s) is/are given at the end of the application.

[3567] The coding portion of transcript Z17877_PEA_{—}1_T6 (SEQ ID NO:1161) is shown in bold; this coding portion starts at position 1206 and ends at position 2270. The transcript also has the following SNPs as listed in Table 8 (given according to their position on the nucleotide sequence, with the alternative nucleic acid listed; the last column indicates whether the SNP is known or not; the presence of known SNPs in variant protein Z17877_PEA_{—}1_P2 (SEQ ID NO:1184) sequence provides support for the deduced sequence of this variant protein according to the present invention).

[3568] The coding portion of transcript Z17877_PEA_{—}1_T11 (SEQ ID NO:1164) is shown in bold; this coding portion starts at position 602 and ends at position 1666. The transcript also has the following SNPs as listed in Table 9 (given according to their position on the nucleotide sequence, with the alternative nucleic acid listed; the last column indicates whether the SNP is known or not; the presence of known SNPs in variant protein Z 17877_PEA_{—}1_P2 (SEQ ID NO:1184) sequence provides support for the deduced sequence of this variant protein according to the present invention).

[3569] Variant protein Z17877_PEA_{—}1_P3 (SEQ ID NO:1185) according to the present invention has an amino acid sequence as given at the end of the application; it is encoded by transcript(s) Z17877_PEA_{—}1_T12 (SEQ ID NO:1165). The location of the variant protein was determined according to results from a number of different software programs and analyses, including analyses from SignalP and other specialized programs. The variant protein is believed to be located as follows with regard to the cell: intracellularly. The protein localization is believed to be intracellularly because of manual inspection of known protein localization and/or gene structure.

[3570] Variant protein Z17877_PEA_{—}1_P3 (SEQ ID NO:1185) also has the following non-silent SNPs (Single Nucleotide Polymorphisms) as listed in Table 10, (given according to their position(s) on the amino acid sequence, with the alternative amino acid(s) listed; the last column indicates whether the SNP is known or not; the presence of known SNPs in variant protein Z17877_PEA_{—}1_P3 (SEQ ID NO:1185) sequence provides support for the deduced sequence of this variant protein according to the present invention).

[3571] Variant protein Z17877_PEA_{—}1_P3 (SEQ ID NO:1185) is encoded by the following transcript(s): Z17877_PEA_{—}1_T12 (SEQ ID NO:1165), for which the sequence(s) is/are given at the end of the application. The coding portion of transcript Z17877_PEA_{—}1_T12 (SEQ ID NO:1165) is shown in bold; this coding portion starts at position 602 and ends at position 1945. The transcript also has the following SNPs as listed in Table 11 (given according to their position on the nucleotide sequence, with the alternative nucleic acid listed; the last column indicates whether the SNP is known or not; the presence of known SNPs in variant protein Z17877_PEA_{—}1_P3 (SEQ ID NO:1185) sequence provides support for the deduced sequence of this variant protein according to the present invention).

[3572] Variant protein Z17877_PEA_{—}1_P6 (SEQ ID NO:1186) according to the present invention has an amino acid sequence as given at the end of the application; it is encoded by transcript(s) Z17877_PEA_{—}1_T2 (SEQ ID NO:1158), Z17877_PEA_{—}1_T4 (SEQ ID NO:1160) and Z17877_PEA_{—}1_T8 (SEQ ID NO:1163). The location of the variant protein was determined according to results from a number of different software programs and analyses, including analyses from SignalP and other specialized programs. The variant protein is believed to be located as follows with regard to the cell: unknown.

[3573] Variant protein Z17877_PEA_{—}1_P6 (SEQ ID NO:1186) also has the following non-silent SNPs (Single Nucleotide Polymorphisms) as listed in Table 12, (given according to their position(s) on the amino acid sequence, with the alternative amino acid(s) listed; the last column indicates whether the SNP is known or not; the presence of known SNPs in variant protein Z17877_PEA_{—}1_P6 (SEQ ID NO:1186) sequence provides support for the deduced sequence of this variant protein according to the present invention).

[3574] Variant protein Z17877_PEA_{—}1_P6 (SEQ ID NO:1186) is encoded by the following transcript(s): Z17877_PEA_{—}1_T2 (SEQ ID NO:1158), Z17877_PEA_{—}1_T4 (SEQ ID NO:1160) and Z17877_PEA_{—}1_T8 (SEQ ID NO:1163), for which the sequence(s) is/are given at the end of the application.

[3575] The coding portion of transcript Z 17877_PEA_{—}1_T2 (SEQ ID NO:1158) is shown in bold; this coding portion starts at position 40 and ends at position 381. The transcript also has the following SNPs as listed in Table 13 (given according to their position on the nucleotide sequence, with the alternative nucleic acid listed; the last column indicates whether the SNP is known or not; the presence of known SNPs in variant protein Z17877_PEA_{—}1_P6 (SEQ ID NO:1186) sequence provides support for the deduced sequence of this variant protein according to the present invention).

[3576] The coding portion of transcript Z17877_PEA_{—}1_T4 (SEQ ID NO:1160) is shown in bold; this coding portion starts at position 40 and ends at position 381. The transcript also has the following SNPs as listed in Table 14 (given according to their position on the nucleotide sequence, with the alternative nucleic acid listed; the last column indicates whether the SNP is known or not; the presence of known SNPs in variant protein Z17877_PEA_{—}1_P6 (SEQ ID NO:1186) sequence provides support for the deduced sequence of this variant protein according to the present invention).

[3577] The coding portion of transcript Z17877_PEA_{—}1_T8 (SEQ ID NO:1163) is shown in bold; this coding portion starts at position 40 and ends at position 381. The transcript also has the following SNPs as listed in Table 15 (given according to their position on the nucleotide sequence, with the alternative nucleic acid listed; the last column indicates whether the SNP is known or not; the presence of known SNPs in variant protein Z17877_PEA_{—}1_P6 (SEQ ID NO:1186) sequence provides support for the deduced sequence of this variant protein according to the present invention).

[3578] As noted above, cluster Z17877 features 17 segment(s), which were listed in Table 2 above and for which the sequence(s) are given at the end of the application. These segment(s) are portions of nucleic acid sequence(s) which are described herein separately because they are of particular interest. A description of each segment according to the present invention is now provided.

[3579] Segment cluster Z17877_PEA_{—}1_node_{—}0 (SEQ ID NO:1166) according to the present invention is supported by 4 libraries. The number of libraries was determined as previously described. This segment can be found in the following transcript(s): Z17877_PEA_{—}1_T0 (SEQ ID NO:1157), Z17877_PEA_{—}1_T2 (SEQ ID NO:1158), Z17877_PEA_{—}1_T3 (SEQ ID NO:1159), Z17877_PEA_{—}1_T4(SEQ ID NO:1160), Z17877_PEA_{—}1_T6(SEQ ID NO:1161), Z17877_PEA_{—}1_T7 (SEQ ID NO:1162), Z17877_PEA_{—}1_T8 (SEQ ID NO:1163), Z17877_PEA_{—}1_T11 (SEQ ID NO:1164) and Z17877_PEA_{—}1_T12 (SEQ ID NO:1165). Table 16 below describes the starting and ending position of this segment on each transcript.

[3580] Segment cluster Z17877_PEA_{—}1_node_{—}3 (SEQ ID NO:1167) according to the present invention is supported by 23 libraries. The number of libraries was determined as previously described. This segment can be found in the following transcript(s): Z17877_PEA_{—}1_T0 (SEQ ID NO:1157), Z17877_PEA_{—}1_T2 (SEQ ID NO:1158), Z17877_PEA_{—}1_T3 (SEQ ID NO:1159), Z17877_PEA_{—}1_T4 (SEQ ID NO:1160), Z17877_PEA_{—}1_T6 (SEQ ID NO:1161) and Z17877_PEA_{—}1_T8 (SEQ ID NO:1163). Table 17 below describes the starting and ending position of this segment on each transcript.

[3581] Segment cluster Z17877_PEA_{—}1_node_{—}8 (SEQ ID NO:1168) according to the present invention is supported by 100 libraries. The number of libraries was determined as previously described. This segment can be found in the following transcript(s): Z17877_PEA_{—}1_T0 (SEQ ID NO:1157), Z17877_PEA_{—}1_T2 (SEQ ID NO:1158), Z17877_PEA_{—}1_T3 (SEQ ID NO:1159), Z17877_PEA_{—}1_T4 (SEQ ID NO:1160), Z17877_PEA_{—}1_T6 (SEQ ID NO:1161) and Z17877_PEA_{—}1_T8 (SEQ ID NO:1163). Table 18 below describes the starting and ending position of this segment on each transcript.

[3582] Segment cluster Z17877_PEA_{—}1_node_{—}9 (SEQ ID NO:1169) according to the present invention is supported by 110 libraries. The number of libraries was determined as previously described. This segment can be found in the following transcript(s): Z17877_PEA_{—}1_T0 (SEQ ID NO:1157), Z17877_PEA_{—}1_T2 (SEQ ID NO:1158), Z17877_PEA_{—}1_T3 (SEQ ID NO:1159), Z17877_PEA_{—}1_T4(SEQ ID NO:1160), Z17877_PEA_{—}1_T6(SEQ ID NO:1161), Z17877_PEA_{—}1_T7(SEQ ID NO:1162), Z17877_PEA_{—}1_T8(SEQ ID NO:1163), Z17877_PEA_{—}1_T11(SEQ ID NO:1164) and Z17877_PEA_{—}1_T12(SEQ ID NO:1165). Table 19 below describes the starting and ending position of this segment on each transcript.

[3583] Segment cluster Z17877_PEA_{—}1_node_{—}10 (SEQ ID NO:1170) according to the present invention is supported by 8 libraries. The number of libraries was determined as previously described. This segment can be found in the following transcript(s): Z17877_PEA_{—}1_T2 (SEQ ID NO:1158) and Z17877_PEA_{—}1_T4 (SEQ ID NO:1160). Table 20 below describes the starting and ending position of this segment on each transcript.

[3584] Segment cluster Z17877_PEA_{—}1_node_{—}11 (SEQ ID NO:1171) according to the present invention is supported by 23 libraries. The number of libraries was determined as previously described. This segment can be found in the following transcript(s): Z17877_PEA_{—}1_T2 (SEQ ID NO:1158) and Z17877_PEA_{—}1_T4 (SEQ ID NO:1160). Table 21 below describes the starting and ending position of this segment on each transcript.

[3585] Segment cluster Z17877_PEA_{—}1_node_{—}13 (SEQ ID NO:1172) according to the present invention is supported by 108 libraries. The number of libraries was determined as previously described. This segment can be found in the following transcript(s): Z17877_PEA_{—}1_T0 (SEQ ID NO:1157), Z17877_PEA_{—}1_T2 (SEQ ID NO:1158), Z17877_PEA_{—}1_T3 (SEQ ID NO:1159), Z17877_PEA_{—}1_T4 (SEQ ID NO:1160), Z17877_PEA_{—}1_T6 (SEQ ID NO:1161), Z17877_PEA_{—}1_T7 (SEQ ID NO:1162), Z17877_PEA_{—}1_T8 (SEQ ID NO:1163), Z17877_PEA_{—}1_T11(SEQ ID NO:1164) and Z17877_PEA_{—}1_T12(SEQ ID NO:1165). Table 22 below describes the starting and ending position of this segment on each transcript.

[3586] Segment cluster Z17877_PEA_{—}1_node_{—}15 (SEQ ID NO:1173) according to the present invention is supported by 139 libraries. The number of libraries was determined as previously described. This segment can be found in the following transcript(s): Z17877_PEA_{—}1_T0 (SEQ ID NO:1157), Z17877_PEA_{—}1_T2 (SEQ ID NO:1158), Z17877_PEA_{—}1_T3 (SEQ ID NO:1159), Z17877_PEA_{—}1_T4 (SEQ ID NO:1160), Z17877_PEA_{—}1_T6 (SEQ ID NO:1161), Z17877_PEA_{—}1_T7 (SEQ ID NO:1162), Z17877_PEA_{—}1_T8 (SEQ ID NO:1163), Z17877_PEA_{—}1_T11 (SEQ ID NO:1164) and Z17877_PEA_{—}1_T12 (SEQ ID NO:1165). Table 23 below describes the starting and ending position of this segment on each transcript.

[3587] Segment cluster Z17877_PEA_{—}1_node_{—}16 (SEQ ID NO:1174) according to the present invention is supported by 21 libraries. The number of libraries was determined as previously described. This segment can be found in the following transcript(s): Z17877_PEA_{—}1_T6 (SEQ ID NO:1161) and Z17877_PEA_{—}1_T11 (SEQ ID NO:1164). Table 24 below describes the starting and ending position of this segment on each transcript.

[3588] Segment cluster Z17877_PEA_{—}1_node_{—}18 (SEQ ID NO:1175) according to the present invention is supported by 263 libraries. The number of libraries was determined as previously described. This segment can be found in the following transcript(s): Z17877_PEA_{—}1_T0 (SEQ ID NO:1157), Z17877_PEA_{—}1_T2 (SEQ ID NO:1158), Z17877_PEA_{—}1_T3 (SEQ ID NO:1159), Z17877_PEA_{—}1_T4 (SEQ ID NO:1160), Z17877_PEA_{—}1_T6 (SEQ ID NO:1161), Z17877_PEA_{—}1_T7 (SEQ ID NO:1162), Z17877_PEA_{—}1_T8 (SEQ ID NO:1163), Z17877_PEA_{—}1_T11 (SEQ ID NO:1164) and Z17877_PEA_{—}1_T12(SEQ ID NO:1165). Table 25 below describes the starting and ending position of this segment on each transcript.

[3589] According to an optional embodiment of the present invention, short segments related to the above cluster are also provided. These segments are up to about 120 bp in length, and so are included in a separate description.

[3590] Segment cluster Z17877_PEA_{—}1_node_{—}1 (SEQ ID NO:1176) according to the present invention is supported by 3 libraries. The number of libraries was determined as previously described. This segment can be found in the following transcript(s): Z17877_PEA_{—}1_T0 (SEQ ID NO:1157), Z17877_PEA_{—}1_T2 (SEQ ID NO:1158), Z17877_PEA_{—}1_T3 (SEQ ID NO:1159, Z17877_PEA_{—}1_T4 (SEQ ID NO:1160), Z17877_PEA_{—}1_T6 (SEQ ID NO:1161), Z17877_PEA_{—}1_T7 (SEQ ID NO:1162), Z17877_PEA_{—}1_T8 (SEQ ID NO:1163), Z17877_PEA_{—}1_T11 (SEQ ID NO:1164) and Z17877_PEA_{—}1_T12 (SEQ ID NO:1165). Table 26 below describes the starting and ending position of this segment on each transcript.

[3591] Segment cluster Z17877_PEA_{—}1_node_{—}2 (SEQ ID NO:1177) according to the present invention can be found in the following transcript(s): Z17877_PEA_{—}1_T0 (SEQ ID NO:1157), Z17877_PEA_{—}1_T2(SEQ ID NO:1158), Z17877_PEA_{—}1_T3(SEQ ID NO:1159), Z17877_PEA_{—}1_T4(SEQ ID NO:1160), Z17877_PEA_{—}1_T6 (SEQ ID NO:1161), Z17877_PEA_{—}1_T7 (SEQ ID NO:1162), Z17877_PEA_{—}1_T8 (SEQ ID NO:1163), Z17877_PEA_{—}1_T11 (SEQ ID NO:1164) and Z17877_PEA_{—}1_T12 (SEQ ID NO:1165). Table 27 below describes the starting and ending position of this segment on each transcript.

[3592] Segment cluster Z17877_PEA_{—}1_node_{—}4 (SEQ ID NO:1178) according to the present invention can be found in the following transcript(s): Z17877_PEA_{—}1_T0 (SEQ ID NO:1157), Z17877_PEA_{—}1_T2 (SEQ ID NO:1158), Z17877_PEA_{—}1_T3 (SEQ ID NO:1159), Z17877_PEA_{—}1_T4(SEQ ID NO:1160), Z17877_PEA_{—}1_T6(SEQ ID NO:1161) and Z17877_PEA_{—}1_T8 (SEQ ID NO:1163). Table 28 below describes the starting and ending position of this segment on each transcript.

[3593] Segment cluster Z17877_PEA_{—}1_node_{—}5 (SEQ ID NO:1179) according to the present invention is supported by 80 libraries. The number of libraries was determined as previously described. This segment can be found in the following transcript(s): Z17877_PEA_{—}1_T0 (SEQ ID NO:1157), Z17877_PEA_{—}1_T2 (SEQ ID NO:1158), Z17877_PEA_{—}1_T3 (SEQ ID NO:1159), Z17877_PEA_{—}1_T6(SEQ ID NO:1161) and Z17877_PEA_{—}1_T8(SEQ ID NO:1163). Table 29 below describes the starting and ending position of this segment on each transcript.

[3594] Segment cluster Z17877_PEA_{—}1_node_{—}6 (SEQ ID NO:1180) according to the present invention can be found in the following transcript(s): Z17877_PEA_{—}1_T0 (SEQ ID NO:1157), Z17877_PEA_{—}1_T2(SEQ ID NO:1158), Z17877_PEA_{—}1_T3(SEQ ID NO:1159), Z17877_PEA_{—}1_T4(SEQ ID NO:1160), Z17877_PEA_{—}1_T6 (SEQ ID NO:1161) and Z17877_PEA_{—}1_T8 (SEQ ID NO:1163). Table 30 below describes the starting and ending position of this segment on each transcript.

[3595] Segment cluster Z17877_PEA_{—}1_node_{—}14 (SEQ ID NO:1181) according to the present invention is supported by 83 libraries. The number of libraries was determined as previously described. This segment can be found in the following transcript(s): Z17877_PEA_{—}1_T0 (SEQ ID NO:1157), Z17877_PEA_{—}1_T2(SEQ ID NO:1158), Z17877_PEA_{—}1_T3(SEQ ID NO:1159), Z17877_PEA_{—}1_T4(SEQ ID NO:1160), Z17877_PEA_{—}1_T6(SEQ ID NO:1161), Z17877_PEA_{—}1_T7(SEQ ID NO:1162), Z17877_PEA_{—}1_T8(SEQ ID NO:1163), Z17877_PEA_{—}1_T11(SEQ ID NO:1164) and Z17877_PEA_{—}1_T12(SEQ ID NO:1165). Table 31 below describes the starting and ending position of this segment on each transcript.

[3596] Segment cluster Z17877_PEA_{—}1_node_{—}17 (SEQ ID NO:1182) according to the present invention is supported by 11 libraries. The number of libraries was determined as previously described. This segment can be found in the following transcript(s): Z17877_PEA_{—}1_T6 (SEQ ID NO:1161), Z17877_PEA_{—}1_T8(SEQ ID NO:1163) and Z17877_PEA_{—}1_T12(SEQ ID NO:1165). Table 32 below describes the starting and ending position of this segment on each transcript.

[3597] Expression of c-myc-P64 mRNA, initiating from promoter P0 Z17877 transcripts which are detectable by amplicon as depicted in sequence name Z17877seg8 (SEQ ID NO:1375) in normal and cancerous colon tissues

[3598] Expression of c-myc-P64 mRNA, initiating from promoter P0 transcripts detectable by or according to seg8, Z17877seg8 amplicon (SEQ ID NO:1375) and Z17877seg8 F(SEQ ID NO:1373) and Z17877seg8 R (SEQ ID NO:1374) primers was measured by real time PCR. In parallel the expression of four housekeeping genes—PBGD (GenBank Accession No. BC019323 (SEQ ID NO:1576); amplicon—PBGD-amplicon, SEQ ID NO:531), HPRT1 (GenBank Accession No. NM_{—}000194 (SEQ ID NO:1577); amplicon—HPRT1-amplicon, SEQ ID NO:612), G6PD (GenBank Accession No. NM_{—}000402 (SEQ ID NO:1578); G6PD amplicon, SEQ ID NO:615), RPS27A (GenBank Accession No. NM_{—}002954 (SEQ ID NO:1579); RPS27A amplicon, SEQ ID NO:1261), was measured similarly. For each RT sample, the expression of the above amplicon was normalized to the geometric mean of the quantities of the housekeeping genes. The normalized quantity of each RT sample was then divided by the median of the quantities of the normal post-mortem (PM) samples (Sample Nos. 41, 52, 62-67, 69-71, Table 1, above, “Tissue samples in testing panel”), to obtain a value of fold up-regulation for each sample relative to median of the normal PM samples.

[3599] FIG. 67 is a histogram showing over expression of the above-indicated c-myc-P64 mRNA, initiating from promoter P0 transcripts in cancerous colon samples relative to the normal samples. The number and percentage of samples that exhibit at least 3 fold over-expression, out of the total number of samples tested is indicated in the bottom. As is evident from FIG. 67, the expression of c-myc-P64 mRNA, initiating from promoter P0 transcripts detectable by the above amplicon in cancer samples was significantly higher than in the non-cancerous samples (Sample Nos. 41, 52, 62-67, 69-71 Table 1, “Tissue samples in testing panel”). Notably an over-expression of at least 3 fold was found in 13 out of 37 adenocarcinoma samples,

[3600] Statistical analysis was applied to verify the significance of these results, as described below.

[3601] The P value for the difference in the expression levels of c-myc-P64 mRNA, initiating from promoter P0 transcripts detectable by the above amplicon in colon cancer samples versus the normal tissue samples was determined by T test as 6.27E-05.

[3602] Threshold of 3 fold overexpression was found to differentiate between cancer and normal samples with P value of 1.85E-02 as checked by exact fisher test. The above values demonstrate statistical significance of the results.

[3603] Primer pairs are also optionally and preferably encompassed within the present invention; for example, for the above experiment, the following primer pair was used as a non-limiting illustrative example only of a suitable primer pair: Z17877seg8F forward primer (SEQ ID NO:1373); and Z17877seg8R reverse primer (SEQ ID NO:1374).

[3604] The present invention also preferably encompasses any amplicon obtained through the use of any suitable primer pair; for example, for the above experiment, the following amplicon was obtained as a non-limiting illustrative example only of a suitable amplicon: Z17877seg8 (SEQ ID NO:1375).

[3605] Combined expression of 19 sequences (T23657seg 29-32 (SEQ ID NO:1363); T23657seg 22 (SEQ ID NO:1360); T23657seg 41 (SEQ ID NO:1366); T23657seg17-18 (SEQ ID NO:1357); AA315457seg8 (SEQ ID NO:1383); R30650seg76 (SEQ ID NO:1354); HUM-CEASeg33 (SEQ ID NO:1345); CEA-Seg35 (SEQ ID NO:1348); CEA-Seg31 (SEQ ID NO: 1342); AA58339seg1 (SEQ ID NO:1327); AA583399seg17 (SEQ ID NO:1324); AA583399-seg30-32 (SEQ ID NO:1321); HUMCACH1Aseg101 (SEQ ID NO:1337); HSHCGIseg20 (SEQ ID NO:1378); HSHCGIseg35 (SEQ ID NO:1381); M78035seg 42 (SEQ ID NO:1351); T51958seg7 (SEQ ID NO:1372); T51958seg38 (SEQ ID NO:1369); Z17877seg8 (SEQ ID NO:1375)) in normal and cancerous colon tissues.

[3606] Expression of solute carrier organic anion transporter family, member 4A1 (SLCO4A1), Carcinoembryonic antigen-related cell adhesion molecule 5 [Precursor], myeloma overexpressed gene (in a subset of t(11;14) positive multiple myelomas) (MYEOV), Voltage-dependent L-type calcium channel alpha-1D subunit Calcium channel, L type, alpha-1 polypeptide, isoform 2, TRIM31 tripartite motif, S-adenosylhomocysteine hydrolase (AHCY), Homo sapiens PTK7 protein tyrosine kinase 7 (PTK7) and c-myc-P64 mRNA, initiating from promoter P0 transcripts detectable by or according to T23657seg 29-32 (SEQ ID NO:1363); T23657seg 22 (SEQ ID NO:1360); T23657seg 41 (SEQ ID NO:1366); T23657seg17-18 (SEQ ID NO:1357); AA315457seg8 SEQ ID NO:1383; R30650seg76 (SEQ ID NO:1354); HUM-CEASeg33 (SEQ ID NO:1345); CEA-Seg35 (SEQ ID NO:1348); CEA-Seg31 (SEQ ID NO: 1342); AA58339seg1 (SEQ ID NO:1327); AA583399seg17 (SEQ ID NO:1324); AA583399-seg30-32 (SEQ ID NO:1321); HUMCACH1Aseg101 (SEQ ID NO:1337); HSHCGIseg20 (SEQ ID NO:1378); HSHCGIseg35 (SEQ ID NO:1381); M78035seg 42 (SEQ ID NO:1351); T51958seg7 (SEQ ID NO:1372); T51958seg38 (SEQ ID NO:1369); Z17877seg8 (SEQ ID NO:1375) amplicons was measured by real time PCR. In parallel the expression of four housekeeping genes—PBGD (GenBank Accession No. BC019323 (SEQ ID NO:1576); amplicon—PBGD-amplicon, SEQ ID NO:531), HPRT1 (GenBank Accession No. NM_{—}000194 (SEQ ID NO:1577); amplicon—HPRT1-amplicon, SEQ ID NO:612), G6PD (GenBank Accession No. NM_{—}000402 (SEQ ID NO:1578); G6PD amplicon, SEQ ID NO:615), RPS27A (GenBank Accession No. NM_{—}002954 (SEQ ID NO:1579); RPS27A amplicon, SEQ ID NO:1261), was measured similarly. For each RT sample, the expression of the above amplicons was normalized to the geometric mean of the quantities of the housekeeping genes. The normalized quantity of each RT sample of each amplicon was then divided by the median of the quantities of the normal post-mortem (PM) samples detected for the same amplicon (Sample Nos. 41, 52, 62-67, 69-71, Table 1, above, “Tissue samples in testing panel”), to obtain a value of fold up-regulation for each sample relative to median of the normal PM samples.

[3607] FIG. 68 is a histogram showing over expression of the above-indicated transcripts in cancerous colon samples relative to the normal samples. The number and percentage of samples that exhibit at least 5 fold over-expression of at least one of the sequences, out of the total number of samples tested is indicated in the bottom.

[3608] As is evident from FIG. 68, an over-expression of at least 5 fold in at least one of the sequences was found in 37 out of 37 adenocarcinoma samples.

[3609] Statistical analysis was applied to verify the significance of these results, as described below. Threshold of 5 fold overexpression of at least one of the amplicons was found to differentiate between cancer and normal samples with P value of 5.31E-10 as checked by exact fisher test.

[3610] The above values demonstrate statistical significance of the results.

[3611] The FIG. 68 shows combined results for the colon panel marker, as a non-limiting example of a combination of markers according to the present invention.

Description for Cluster HSHCGI

[3612] Cluster HSHCGI features 24 transcript(s) and 29 segment(s) of interest, the names for which are given in Tables 1 and 2, respectively, the sequences themselves are given at the end of the application. The selected protein variants are given in table 3.

[3613] As noted above, cluster HSHCGI features 24 transcript(s), which were listed in Table 1 above. A description of each variant protein according to the present invention is now provided.

[3614] Variant protein HSHCGI_PEA_{—}3_P17 (SEQ ID NO:1243) according to the present invention has an amino acid sequence as given at the end of the application; it is encoded by transcript(s) HSHCGI_PEA_{—}3_T13 (SEQ ID NO:1200). One or more alignments to one or more previously published protein sequences are given at the end of the application. A brief description of the relationship of the variant protein according to the present invention to each such aligned protein is as follows:

[3615] Comparison report between HSHCGI_PEA_{—}3_P17 (SEQ ID NO:1243) and TM31_HUMAN (SEQ ID NO:1242):

[3616] 1. An isolated chimeric polypeptide encoding for HSHCGI_PEA_{—}3_P17 (SEQ ID NO:1243), comprising a first amino acid sequence being at least 90% homologous to MASGQFVNKLQEEVICPICLDILQKPVTIDCGHNFCPQCITQIGETSCGFFKCPLCKTSVR RDAIRFNSLLRNLVEKIQALQASEVQSKRKEATCPRHQEMFHYFCEDDGKFLCFVCRES KDHKSHNVSLIEEAAQNYQGQIQEQIQVLQQKEKETVQVKAQGVHRVDVFTDQVEHE KQRILTEFELLHQVLEEEKNFLLSRIYWLGHEGTEAGKHYV corresponding to amino acids 1-218 of TM31_HUMAN (SEQ ID NO:1242), which also corresponds to amino acids 1-218 of HSHCGI_PEA_{—}3_P17 (SEQ ID NO:1243), and a second amino acid sequence being at least 70%, optionally at least 80%, preferably at least 85%, more preferably at least 90% and most preferably at least 95% homologous to a polypeptide having the sequence EIPLMPTVERSQEARCYP (SEQ ID NO:1442) corresponding to amino acids 219-236 of HSHCGI_PEA_{—}3_P17 (SEQ ID NO:1243), wherein said first amino acid sequence and second amino acid sequence are contiguous and in a sequential order.

[3617] 2. An isolated polypeptide encoding for a tail of HSHCGI_PEA_{—}3_P17 (SEQ ID NO:1243), comprising a polypeptide being at least 70%, optionally at least about 80%, preferably at least about 85%, more preferably at least about 90% and most preferably at least about 95% homologous to the sequence EIPLMPTVERSQEARCYP (SEQ ID NO:1442) in HSHCGI_PEA_{—}3_P17 (SEQ ID NO:1243).

[3618] The location of the variant protein was determined according to results from a number of different software programs and analyses, including analyses from SignalP and other specialized programs. The variant protein is believed to be located as follows with regard to the cell: intracellularly. The protein localization is believed to be intracellularly because neither of the trans-membrane region prediction programs predicted a trans-membrane region for this protein. In addition both signal-peptide prediction programs predict that this protein is a non-secreted protein.

[3619] Variant protein HSHCGI_PEA_{—}3_P17 (SEQ ID NO:1243) also has the following non-silent SNPs (Single Nucleotide Polymorphisms) as listed in Table 4, (given according to their position(s) on the amino acid sequence, with the alternative amino acid(s) listed; the last column indicates whether the SNP is known or not; the presence of known SNPs in variant protein HSHCGI_PEA_{—}3_P17 (SEQ ID NO:1243) sequence provides support for the deduced sequence of this variant protein according to the present invention).

[3620] Variant protein HSHCGI_PEA_{—}3_P17 (SEQ ID NO:1243) is encoded by the following transcript(s): HSHCGI_PEA_{—}3_T13 (SEQ ID NO:1200), for which the sequence(s) is/are given at the end of the application. The coding portion of transcript HSHCGI_PEA_{—}3_T13 (SEQ ID NO:1200) is shown in bold; this coding portion starts at position 111 and ends at position 814. The transcript also has the following SNPs as listed in Table 5 (given according to their position on the nucleotide sequence, with the alternative nucleic acid listed; the last column indicates whether the SNP is known or not; the presence of known SNPs in variant protein HSHCGI_PEA_{—}3_P17 (SEQ ID NO:1243) sequence provides support for the deduced sequence of this variant protein according to the present invention).

[3621] Variant protein HSHCGI_PEA_{—}3_P18 (SEQ ID NO:1244) according to the present invention has an amino acid sequence as given at the end of the application; it is encoded by transcript(s) HSHCGI_PEA_{—}3_T0 (SEQ ID NO:1187). The location of the variant protein was determined according to results from a number of different software programs and analyses, including analyses from SignalP and other specialized programs. The variant protein is believed to be located as follows with regard to the cell: intracellularly. The protein localization is believed to be intracellularly because neither of the trans-membrane region prediction programs predicted a trans-membrane region for this protein. In addition both signal-peptide prediction programs predict that this protein is a non-secreted protein.

[3622] Variant protein HSHCGI_PEA_{—}3_P18 (SEQ ID NO:1244) also has the following non-silent SNPs (Single Nucleotide Polymorphisms) as listed in Table 6, (given according to their position(s) on the amino acid sequence, with the alternative amino acid(s) listed; the last column indicates whether the SNP is known or not; the presence of known SNPs in variant protein HSHCGI_PEA_{—}3_P18 (SEQ ID NO:1244) sequence provides support for the deduced sequence of this variant protein according to the present invention).

[3623] Variant protein HSHCGI_PEA_{—}3_P18 (SEQ ID NO:1244) is encoded by the following transcript(s): HSHCGI_PEA_{—}3_T0 (SEQ ID NO:1187), for which the sequence(s) is/are given at the end of the application. The coding portion of transcript HSHCGI_PEA_{—}3_T0 (SEQ ID NO:1187) is shown in bold; this coding portion starts at position 111 and ends at position 1385. The transcript also has the following SNPs as listed in Table 7 (given according to their position on the nucleotide sequence, with the alternative nucleic acid listed; the last column indicates whether the SNP is known or not; the presence of known SNPs in variant protein HSHCGI_PEA_{—}3_P18 (SEQ ID NO:1244) sequence provides support for the deduced sequence of this variant protein according to the present invention).

[3624] Variant protein HSHCGI_PEA_{—}3_P19 (SEQ ID NO:1245) according to the present invention has an amino acid sequence as given at the end of the application; it is encoded by transcript(s) HSHCGI_PEA_{—}3_T11 (SEQ ID NO:1198). One or more alignments to one or more previously published protein sequences are given at the end of the application. A brief description of the relationship of the variant protein according to the present invention to each such aligned protein is as follows:

[3625] Comparison report between HSHCGI_PEA_{—}3_P19 (SEQ ID NO:1245) and TM31_HUMAN_V2 (SEQ ID NO:1241):

[3626] 1. An isolated chimeric polypeptide encoding for HSHCGI_PEA_{—}3_P19 (SEQ ID NO:1245), comprising a first amino acid sequence being at least 90% homologous to MASGQFVNKLQEEVICPICLDILQKPVTIDCGHNFCLKClTQIGETSCGFFKCPLCKTSVR RDAIRFNSLLRNLVEKIQALQASEVQSKRKEATCPRHQEMFHYFCEDDGKFLCFVCRES KDHKSHNVSLIEEAAQNYQGQIQEQIQVLQQKEKETVQVKAQGVHRVDVFTDQVEHE KQRILTEFELLHQVLEEEKNFLLSRIYWLGHEGTEAGKHYVASTEPQLNDLKKLVDSLK TKQNMPPRQLLE corresponding to amino acids 1-248 of TM31_HUMAN_V2 (SEQ ID NO:1241), which also corresponds to amino acids 1-248 of HSHCGI_PEA_{—}3_P19 (SEQ ID NO:1245), and a second amino acid sequence being at least 70%, optionally at least 80%, preferably at least 85%, more preferably at least 90% and most preferably at least 95% homologous to a polypeptide having the sequence NWRKNSVKQNQDTTPSQGA (SEQ ID NO:1443) corresponding to amino acids 249-267 of HSHCGI_PEA_{—}3_P19 (SEQ ID NO:1245), wherein said first amino acid sequence and second amino acid sequence are contiguous and in a sequential order.

[3627] 2. An isolated polypeptide encoding for a tail of HSHCGI_PEA_{—}3_P19 (SEQ ID NO:1245), comprising a polypeptide being at least 70%, optionally at least about 80%, preferably at least about 85%, more preferably at least about 90% and most preferably at least about 95% homologous to the sequence NWRKNSVKQNQDTTPSQGA (SEQ ID NO:1443) in HSHCGI_PEA_{—}3_P19 (SEQ ID NO:1245).

[3628] It should be noted that the known protein sequence (TM31_HUMAN (SEQ ID NO:1242)) has one or more changes than the sequence given at the end of the application and named as being the amino acid sequence for TM31_HUMAN_V2 (SEQ ID NO:1241). These changes were previously known to occur and are listed in the table below.

[3629] The location of the variant protein was determined according to results from a number of different software programs and analyses, including analyses from SignalP and other specialized programs. The variant protein is believed to be located as follows with regard to the cell: intracellularly. The protein localization is believed to be intracellularly because neither of the trans-membrane region prediction programs predicted a trans-membrane region for this protein. In addition both signal-peptide prediction programs predict that this protein is a non-secreted protein.

[3630] Variant protein HSHCGI_PEA_{—}3_P19 (SEQ ID NO:1245) also has the following non-silent SNPs (Single Nucleotide Polymorphisms) as listed in Table 9, (given according to their position(s) on the amino acid sequence, with the alternative amino acid(s) listed; the last column indicates whether the SNP is known or not; the presence of known SNPs in variant protein HSHCGI_PEA_{—}3_P19 (SEQ ID NO:1245) sequence provides support for the deduced sequence of this variant protein according to the present invention).

[3631] Variant protein HSHCGI_PEA_{—}3_P19 (SEQ ID NO:1245) is encoded by the following transcript(s): HSHCGI_PEA_{—}3_T11 (SEQ ID NO:1198), for which the sequence(s) is/are given at the end of the application. The coding portion of transcript HSHCGI_PEA_{—}3_T11 (SEQ ID NO:1198) is shown in bold; this coding portion starts at position 111 and ends at position 911. The transcript also has the following SNPs as listed in Table 10 (given according to their position on the nucleotide sequence, with the alternative nucleic acid listed; the last column indicates whether the SNP is known or not; the presence of known SNPs in variant protein HSHCGI_PEA_{—}3_P19 (SEQ ID NO:1245) sequence provides support for the deduced sequence of this variant protein according to the present invention).

[3632] Variant protein HSHCGI_PEA_{—}3_P1 (SEQ ID NO:1246) according to the present invention has an amino acid sequence as given at the end of the application; it is encoded by transcript(s) HSHCGI_PEA_{—}3_T3 (SEQ ID NO:1190). The location of the variant protein was determined according to results from a number of different software programs and analyses, including analyses from SignalP and other specialized programs. The variant protein is believed to be located as follows with regard to the cell: intracellularly. The protein localization is believed to be intracellularly because neither of the trans-membrane region prediction programs predicted a trans-membrane region for this protein. In addition both signal-peptide prediction programs predict that this protein is a non-secreted protein.

[3633] Variant protein HSHCGI_PEA_{—}3_P1 (SEQ ID NO:1246) also has the following non-silent SNPs (Single Nucleotide Polymorphisms) as listed in Table 11, (given according to their position(s) on the amino acid sequence, with the alternative amino acid(s) listed; the last column indicates whether the SNP is known or not; the presence of known SNPs in variant protein HSHCGI_PEA_{—}3_P1 (SEQ ID NO:1246) sequence provides support for the deduced sequence of this variant protein according to the present invention).

[3634] Variant protein HSHCGI_PEA_{—}3_P1 (SEQ ID NO:1246) is encoded by the following transcript(s): HSHCGI_PEA_{—}3_T3 (SEQ ID NO:1190), for which the sequence(s) is/are given at the end of the application. The coding portion of transcript HSHCGI_PEA_{—}3_T3 (SEQ ID NO:1190) is shown in bold; this coding portion starts at position 139 and ends at position 1413. The transcript also has the following SNPs as listed in Table 12 (given according to their position on the nucleotide sequence, with the alternative nucleic acid listed; the last column indicates whether the SNP is known or not; the presence of known SNPs in variant protein HSHCGI_PEA_{—}3_P1 (SEQ ID NO:1246) sequence provides support for the deduced sequence of this variant protein according to the present invention).

[3635] Variant protein HSHCGI_PEA_{—}3_P4 (SEQ ID NO:1247) according to the present invention has an amino acid sequence as given at the end of the application; it is encoded by transcript(s) HSHCGI_PEA_{—}3_T5 (SEQ ID NO:1192). One or more alignments to one or more previously published protein sequences are given at the end of the application. A brief description of the relationship of the variant protein according to the present invention to each such aligned protein is as follows:

[3636] Comparison report between HSHCGI_PEA_{—}3_P4 (SEQ ID NO:1247) and TM31_HUMAN_V 1 (SEQ ID NO:1240):

[3637] 1. An isolated chimeric polypeptide encoding for HSHCGI_PEA_{—}3_P4 (SEQ ID NO:1247), comprising a first amino acid sequence being at least 90% homologous to MASGQFVNKLQEEVICPICLDILQKPVTIDCGHNFCLKClTQIGETSCGFFKCPLCKTSVR KNAIRFNSLLRNLVEKIQALQASEVQSKRKEATCPRHQEMFHYFCEDDGKFLCFVCRES KDHKSHNVSLIEEAAQNYQGQIQEQIQVLQQKEKETVQVKAQGVHRVDVFTDQVEHE KQRILTEFELLHQVLEEEKNFLLSRIYWLGHEGTEAGKHYVASTEPQLNDLKKLVDSLK TKQNMPPRQLLEDIKVVLCR corresponding to amino acids 1-256 of TM31_HUMAN_V1 (SEQ ID NO:1240), which also corresponds to amino acids 1-256 of HSHCGI_PEA_{—}3_P4 (SEQ ID NO:1247), and a second amino acid sequence being at least 70%, optionally at least 80%, preferably at least 85%, more preferably at least 90% and most preferably at least 95% homologous to a polypeptide having the sequence YDGPPQMYFAY (SEQ ID NO:1444) corresponding to amino acids 257-267 of HSHCGI_PEA_{—}3_P4 (SEQ ID NO:1247), wherein said first amino acid sequence and second amino acid sequence are contiguous and in a sequential order.

[3638] 2. An isolated polypeptide encoding for a tail of HSHCGI_PEA_{—}3_P4 (SEQ ID NO:1247), comprising a polypeptide being at least 70%, optionally at least about 80%, preferably at least about 85%, more preferably at least about 90% and most preferably at least about 95% homologous to the sequence YDGPPQMYFAY (SEQ ID NO:1444) in HSHCGI_PEA_{—}3_P4 (SEQ ID NO:1247).

[3639] It should be noted that the known protein sequence (TM31_HUMAN (SEQ ID NO:1242)) has one or more changes than the sequence given at the end of the application and named as being the amino acid sequence for TM31_HUMAN_V1 (SEQ ID NO:1240). These changes were previously known to occur and are listed in the table below.

[3640] The location of the variant protein was determined according to results from a number of different software programs and analyses, including analyses from SignalP and other specialized programs. The variant protein is believed to be located as follows with regard to the cell: intracellularly. The protein localization is believed to be intracellularly because neither of the trans-membrane region prediction programs predicted a trans-membrane region for this protein. In addition both signal-peptide prediction programs predict that this protein is a non-secreted protein.

[3641] Variant protein HSHCGI_PEA_{—}3_P4 (SEQ ID NO:1247) also has the following non-silent SNPs (Single Nucleotide Polymorphisms) as listed in Table 14, (given according to their position(s) on the amino acid sequence, with the alternative amino acid(s) listed; the last column indicates whether the SNP is known or not; the presence of known SNPs in variant protein HSHCGI_PEA_{—}3_P4 (SEQ ID NO:1247) sequence provides support for the deduced sequence of this variant protein according to the present invention).

[3642] Variant protein HSHCGI_PEA_{—}3_P4 (SEQ ID NO:1247) is encoded by the following transcript(s): HSHCGI_PEA_{—}3_T5 (SEQ ID NO:1192), for which the sequence(s) is/are given at the end of the application. The coding portion of transcript HSHCGI_PEA_{—}3_T5 (SEQ ID NO:1192) is shown in bold; this coding portion starts at position 139 and ends at position 939. The transcript also has the following SNPs as listed in Table 15 (given according to their position on the nucleotide sequence, with the alternative nucleic acid listed; the last column indicates whether the SNP is known or not; the presence of known SNPs in variant protein HSHCGI_PEA_{—}3_P4 (SEQ ID NO:1247) sequence provides support for the deduced sequence of this variant protein according to the present invention).

[3643] Variant protein HSHCGI_PEA_{—}3_P6 (SEQ ID NO:1248) according to the present invention has an amino acid sequence as given at the end of the application; it is encoded by transcript(s) HSHCGI_PEA_{—}3_T7 (SEQ ID NO:1194). One or more alignments to one or more previously published protein sequences are given at the end of the application. A brief description of the relationship of the variant protein according to the present invention to each such aligned protein is as follows:

[3644] Comparison report between HSHCGI_PEA_{—}3_P6 (SEQ ID NO:1248) and TM31_HUMAN_V1 (SEQ ID NO:1240):

[3645] 1. An isolated chimeric polypeptide encoding for HSHCGI_PEA_{—}3_P6 (SEQ ID NO:1248), comprising a first amino acid sequence being at least 90% homologous to MASGQFVNKLQEEVICPICLDILQKPVTIDCGHNFCLKClTQIGETSCGFFKCPLCKTSVR KNAIRFNSLLRNLVEKIQALQASEVQSKRKEATCPRHQEMFHYFCEDDGKFLCFVCRES KDHKSHNVSLIEEAAQNYQGQIQEQIQVLQQKEKETVQVKAQGVHRVDVFTDQVEHE KQRILTEFELLHQVLEEEKNFLLSRIYWLGHEGTEAGKHYVASTEPQLNDLKKLVDSLK TKQNMPPRQLLEDIKVVLCR corresponding to amino acids 1-256 of TM31_HUMAN_V1 (SEQ ID NO:1240), which also corresponds to amino acids 1-256 of HSHCGI_PEA_{—}3_P6 (SEQ ID NO:1248), and a second amino acid sequence being at least 70%, optionally at least 80%, preferably at least 85%, more preferably at least 90% and most preferably at least 95% homologous to a polypeptide having the sequence PTPG (SEQ ID NO:1445) corresponding to amino acids 257-260 of HSHCGI_PEA_{—}3_P6 (SEQ ID NO:1248), wherein said first amino acid sequence and second amino acid sequence are contiguous and in a sequential order.

[3646] 2. An isolated polypeptide encoding for a tail of HSHCGI_PEA_{—}3_P6 (SEQ ID NO:1248) comprising a polypeptide being at least 70%, optionally at least about 80%, preferably at least about 85%, more preferably at least about 90% and most preferably at least about 95% homologous to the sequence PTPG (SEQ ID NO:1445) in HSHCGI_PEA_{—}3_P6 (SEQ ID NO:1248).

[3647] It should be noted that the known protein sequence (TM31_HUMAN (SEQ ID NO:1242)) has one or more changes than the sequence given at the end of the application and named as being the amino acid sequence for TM31_HUMAN_V1 (SEQ ID NO:1240). These changes were previously known to occur and are listed in the table below.

[3648] The location of the variant protein was determined according to results from a number of different software programs and analyses, including analyses from SignalP and other specialized programs. The variant protein is believed to be located as follows with regard to the cell: intracellularly. The protein localization is believed to be intracellularly because neither of the trans-membrane region prediction programs predicted a trans-membrane region for this protein. In addition both signal-peptide prediction programs predict that this protein is a non-secreted protein.

[3649] Variant protein HSHCGI_PEA_{—}3_P6 (SEQ ID NO:1248) also has the following non-silent SNPs (Single Nucleotide Polymorphisms) as listed in Table 17, (given according to their position(s) on the amino acid sequence, with the alternative amino acid(s) listed; the last column indicates whether the SNP is known or not; the presence of known SNPs in variant protein HSHCGI_PEA_{—}3_P6 (SEQ ID NO:1248) sequence provides support for the deduced sequence of this variant protein according to the present invention).

[3650] Variant protein HSHCGI_PEA_{—}3_P6 (SEQ ID NO:1248) is encoded by the following transcript(s): HSHCGI_PEA_{—}3_T7 (SEQ ID NO:1194), for which the sequence(s) is/are given at the end of the application. The coding portion of transcript HSHCGI_PEA_{—}3_T7 (SEQ ID NO:1194) is shown in bold; this coding portion starts at position 139 and ends at position 918. The transcript also has the following SNPs as listed in Table 18 (given according to their position on the nucleotide sequence, with the alternative nucleic acid listed; the last column indicates whether the SNP is known or not; the presence of known SNPs in variant protein HSHCGI_PEA_{—}3_P6 (SEQ ID NO:1248) sequence provides support for the deduced sequence of this variant protein according to the present invention).

[3651] Variant protein HSHCGI_PEA_{—}3_P7 (SEQ ID NO:1249) according to the present invention has an amino acid sequence as given at the end of the application; it is encoded by transcript(s) HSHCGI_PEA_{—}3_T8 (SEQ ID NO:1195). One or more alignments to one or more previously published protein sequences are given at the end of the application. A brief description of the relationship of the variant protein according to the present invention to each such aligned protein is as follows:

[3652] Comparison report between HSHCGI_PEA_{—}3_P7 (SEQ ID NO:1249) and TM31_HUMAN_V1 (SEQ ID NO:1240):

[3653] 1. An isolated chimeric polypeptide encoding for HSHCGI_PEA_{—}3_P7 (SEQ ID NO:1249, comprising a first amino acid sequence being at least 90% homologous to MASGQFVNKLQEEVICPICLDILQKPVTIDCGHNFCLKClTQIGETSCGFFKCPLCKTSVR KNAIRFNSLLRNLVEKIQALQASEVQSKRKEATCPRHQEMFHYFCEDDGKFLCFVCRES KDHKSHNVSLIEEAAQNYQGQIQEQIQVLQQKEKETVQVKAQGVHRVDVFTDQVEHE KQRILTEFELLHQVLEEEKNFLLSRIYWLGHEGTEAGKHYVASTEPQLNDLKKLVDSLK TKQNMPPRQLLEDIKVVLCRS corresponding to amino acids 1-257 of TM31_HUMAN_V1 (SEQ ID NO:1240), which also corresponds to amino acids 1-257 of HSHCGI_PEA_{—}3_P7 (SEQ ID NO:1249), and a second amino acid sequence being at least 70%, optionally at least 80%, preferably at least 85%, more preferably at least 90% and most preferably at least 95% homologous to a polypeptide having the sequence SFSHTSSPDLTNQLNHIFLEVKSFSFSTQPLFLWNWRKNSVKQNQDTTPSQGA (SEQ ID NO:1446) corresponding to amino acids 258-310 of HSHCGI_PEA_{—}3_P7 (SEQ ID NO:1249), wherein said first amino acid sequence and second amino acid sequence are contiguous and in a sequential order.

[3654] 2. An isolated polypeptide encoding for a tail of HSHCGI_PEA_{—}3_P7 (SEQ ID NO:1249), comprising a polypeptide being at least 70%, optionally at least about 80%, preferably at least about 85%, more preferably at least about 90% and most preferably at least about 95% homologous to the sequence SFSHTSSPDLTNQLNHIFLEVKSFSFSTQPLFLWNWRKNSVKQNQDTTPSQGA (SEQ ID NO:1446) in HSHCGI_PEA_{—}3_P7 (SEQ ID NO:1249).

[3655] It should be noted that the known protein sequence (TM31_HUMAN (SEQ ID NO:1242)) has one or more changes than the sequence given at the end of the application and named as being the amino acid sequence for TM31_HUMAN_V1 (SEQ ID NO:1240). These changes were previously known to occur and are listed in the table below.

[3656] The location of the variant protein was determined according to results from a number of different software programs and analyses, including analyses from SignalP and other specialized programs. The variant protein is believed to be located as follows with regard to the cell: intracellularly. The protein localization is believed to be intracellularly because neither of the trans-membrane region prediction programs predicted a trans-membrane region for this protein. In addition both signal-peptide prediction programs predict that this protein is a non-secreted protein.

[3657] Variant protein HSHCGI_PEA_{—}3_P7 (SEQ ID NO:1249) also has the following non-silent SNPs (Single Nucleotide Polymorphisms) as listed in Table 20, (given according to their position(s) on the amino acid sequence, with the alternative amino acid(s) listed; the last column indicates whether the SNP is known or not; the presence of known SNPs in variant protein HSHCGI_PEA_{—}3_P7 (SEQ ID NO:1249) sequence provides support for the deduced sequence of this variant protein according to the present invention).

[3658] Variant protein HSHCGI_PEA_{—}3_P7 (SEQ ID NO:1249) is encoded by the following transcript(s): HSHCGI_PEA_{—}3_T8 (SEQ ID NO:1195), for which the sequence(s) is/are given at the end of the application. The coding portion of transcript HSHCGI_PEA_{—}3_T8 (SEQ ID NO:1195) is shown in bold; this coding portion starts at position 139 and ends at position 1068. The transcript also has the following SNPs as listed in Table 21 (given according to their position on the nucleotide sequence, with the alternative nucleic acid listed; the last column indicates whether the SNP is known or not; the presence of known SNPs in variant protein HSHCGI_PEA_{—}3_P7 (SEQ ID NO:1249) sequence provides support for the deduced sequence of this variant protein according to the present invention).

[3659] Variant protein HSHCGI_PEA_{—}3_P8 (SEQ ID NO:1250) according to the present invention has an amino acid sequence as given at the end of the application; it is encoded by transcript(s) HSHCGI_PEA_{—}3_T9 (SEQ ID NO:1196). One or more alignments to one or more previously published protein sequences are given at the end of the application. A brief description of the relationship of the variant protein according to the present invention to each such aligned protein is as follows:

[3660] Comparison report between HSHCGI_PEA_{—}3_P8 (SEQ ID NO:1250) and TM31_HUMAN_V1 (SEQ ID NO:1240):

[3661] 1. An isolated chimeric polypeptide encoding for HSHCGI_PEA_{—}3_P8 (SEQ ID NO:1250), comprising a first amino acid sequence being at least 90% homologous to MASGQFVNKLQEEVICPICLDILQKPVTIDCGHNFCLKClTQIGETSCGFFKCPLCKTSVR KNAIRFNSLLRNLVEKIQALQASEVQSKRKEATCPRHQEMFHYFCEDDGKFLCFVCRES KDHKSHNVSLIEEAAQNYQGQIQEQIQVLQQKEKETVQVKAQGVHRVDVFTDQVEHE KQRILTEFELLHQVLEEEKNFLLSRIYWLGHEGTEAGKHYVASTEPQLNDLKKLVDSLK TKQNMPPRQLLEDIKVVLCRSEEFQFLNPTPVPLELEKKLSEAKSRHDSITGSLKKFKDQ LQADRKKDENRFFKSMNKNDMKSWGLLQKNNHKMNKTSEPGSSSAG corresponding to amino acids 1-342 of TM31_HUMAN_V1 (SEQ ID NO:1240), which also corresponds to amino acids 1-342 of HSHCGI_PEA_{—}3_P8 (SEQ ID NO:1250), and a second amino acid sequence being at least 70%, optionally at least 80%, preferably at least 85%, more preferably at least 90% and most preferably at least 95% homologous to a polypeptide having the sequence KSPVSEY corresponding to amino acids 343-349 of HSHCGI_PEA_{—}3_P8 (SEQ ID NO:1250) wherein said first amino acid sequence and second amino acid sequence are contiguous and in a sequential order.

[3662] 2. An isolated polypeptide encoding for a tail of HSHCGI_PEA_{—}3_P8 (SEQ ID NO:1250) comprising a polypeptide being at least 70%, optionally at least about 80%, preferably at least about 85%, more preferably at least about 90% and most preferably at least about 95% homologous to the sequence KSPVSEY in HSHCGI_PEA_{—}3_P8 (SEQ ID NO:1250).

[3663] It should be noted that the known protein sequence (TM31_HUMAN (SEQ ID NO:1242)) has one or more changes than the sequence given at the end of the application and named as being the amino acid sequence for TM31_HUMAN_V1 (SEQ ID NO:1240). These changes were previously known to occur and are listed in the table below.

[3664] The location of the variant protein was determined according to results from a number of different software programs and analyses, including analyses from SignalP and other specialized programs. The variant protein is believed to be located as follows with regard to the cell: intracellularly. The protein localization is believed to be intracellularly because neither of the trans-membrane region prediction programs predicted a trans-membrane region for this protein. In addition both signal-peptide prediction programs predict that this protein is a non-secreted protein.

[3665] Variant protein HSHCGI_PEA_{—}3_P8 (SEQ ID NO:1250) also has the following non-silent SNPs (Single Nucleotide Polymorphisms) as listed in Table 23, (given according to their position(s) on the amino acid sequence, with the alternative amino acid(s) listed; the last column indicates whether the SNP is known or not; the presence of known SNPs in variant protein HSHCGI_PEA_{—}3_P8 (SEQ ID NO:1250) sequence provides support for the deduced sequence of this variant protein according to the present invention).

[3666] Variant protein HSHCGI_PEA_{—}3_P8 (SEQ ID NO:1250) is encoded by the following transcript(s): HSHCGI_PEA_{—}3_T9 (SEQ ID NO:1196), for which the sequence(s) is/are given at the end of the application. The coding portion of transcript HSHCGI_PEA_{—}3_T9 (SEQ ID NO:1196) is shown in bold; this coding portion starts at position 139 and ends at position 1185. The transcript also has the following SNPs as listed in Table 24 (given according to their position on the nucleotide sequence, with the alternative nucleic acid listed; the last column indicates whether the SNP is known or not; the presence of known SNPs in variant protein HSHCGI_PEA_{—}3_P8 (SEQ ID NO:1250) sequence provides support for the deduced sequence of this variant protein according to the present invention).

[3667] Variant protein HSHCGI_PEA_{—}3_P9 (SEQ ID NO:1251) according to the present invention has an amino acid sequence as given at the end of the application; it is encoded by transcript(s) HSHCGI_PEA_{—}3_T10 (SEQ ID NO:1197). One or more alignments to one or more previously published protein sequences are given at the end of the application. A brief description of the relationship of the variant protein according to the present invention to each such aligned protein is as follows:

[3668] Comparison report between HSHCGI_PEA_{—}3_P9 (SEQ ID NO:1251) and TM31_HUMAN_V1 (SEQ ID NO:1240):

[3669] 1. An isolated chimeric polypeptide encoding for HSHCGI_PEA_{—}3_P9 (SEQ ID NO:1251), comprising a first amino acid sequence being at least 90% homologous to MASGQFVNKLQEEVICPICLDILQKPVTIDCGHNFCLKClTQIGETSCGFFKCPLCKTSVR KNAIRFNSLLRNLVEKIQALQASEVQSKRKEATCPRHQEMFHYFCEDDGKFLCFVCRES KDHKSHNVSLIEEAAQNYQGQIQEQIQVLQQKEKETVQVKAQGVHRVDVFTDQVEHE KQRILTEFELLHQVLEEEKNFLLSRIYWLGHEGTEAGKHYVASTEPQLNDLKKLVDSLK TKQNMPPRQLLEDIKVVLCR corresponding to amino acids 1-256 of TM31_HUMAN_V1 (SEQ ID NO:1240), which also corresponds to amino acids 1-256 of HSHCGI_PEA_{—}3_P9 (SEQ ID NO:1251), and a second amino acid sequence being at least 70%, optionally at least 80%, preferably at least 85%, more preferably at least 90% and most preferably at least 95% homologous to a polypeptide having the sequence TGEKTQ (SEQ ID NO:1448) corresponding to amino acids 257-262 of HSHCGI_PEA_{—}3_P9 (SEQ ID NO:1251), wherein said first amino acid sequence and second amino acid sequence are contiguous and in a sequential order.

[3670] 2. An isolated polypeptide encoding for a tail of HSHCGI_PEA_{—}3_P9 (SEQ ID NO:1251) comprising a polypeptide being at least 70%, optionally at least about 80%, preferably at least about 85%, more preferably at least about 90% and most preferably at least about 95% homologous to the sequence TGEKTQ (SEQ ID NO:1448) in HSHCGI_PEA_{—}3_P9 (SEQ ID NO:1251).

[3671] It should be noted that the known protein sequence (TM31_HUMAN (SEQ ID NO:1242)) has one or more changes than the sequence given at the end of the application and named as being the amino acid sequence for TM31_HUMAN_V1 (SEQ ID NO:1240). These changes were previously known to occur and are listed in the table below.

[3672] The location of the variant protein was determined according to results from a number of different software programs and analyses, including analyses from SignalP and other specialized programs. The variant protein is believed to be located as follows with regard to the cell: intracellularly. The protein localization is believed to be intracellularly because neither of the trans-membrane region prediction programs predicted a trans-membrane region for this protein. In addition both signal-peptide prediction programs predict that this protein is a non-secreted protein.

[3673] Variant protein HSHCGI_PEA_{—}3_P9 (SEQ ID NO:1251) also has the following non-silent SNPs (Single Nucleotide Polymorphisms) as listed in Table 26, (given according to their position(s) on the amino acid sequence, with the alternative amino acid(s) listed; the last column indicates whether the SNP is known or not; the presence of known SNPs in variant protein HSHCGI_PEA_{—}3_P9 (SEQ ID NO:1251) sequence provides support for the deduced sequence of this variant protein according to the present invention).

[3674] Variant protein HSHCGI_PEA_{—}3_P9 (SEQ ID NO:1251) is encoded by the following transcript(s): HSHCGI_PEA_{—}3_T10 (SEQ ID NO:1197), for which the sequence(s) is/are given at the end of the application. The coding portion of transcript HSHCGI_PEA_{—}3_T10 (SEQ ID NO:1197) is shown in bold; this coding portion starts at position 139 and ends at position 924. The transcript also has the following SNPs as listed in Table 27 (given according to their position on the nucleotide sequence, with the alternative nucleic acid listed; the last column indicates whether the SNP is known or not; the presence of known SNPs in variant protein HSHCGI_PEA_{—}3_P9 (SEQ ID NO:1251) sequence provides support for the deduced sequence of this variant protein according to the present invention).

[3675] Variant protein HSHCGI_PEA_{—}3_P12 (SEQ ID NO:1252) according to the present invention has an amino acid sequence as given at the end of the application; it is encoded by transcript(s) HSHCGI_PEA_{—}3_T14 (SEQ ID NO:1201). One or more alignments to one or more previously published protein sequences are given at the end of the application. A brief description of the relationship of the variant protein according to the present invention to each such aligned protein is as follows:

[3676] Comparison report between HSHCGI_PEA_{—}3_P12 (SEQ ID NO:1252) and TM31_HUMAN (SEQ ID NO:1242):

[3677] 1. An isolated chimeric polypeptide encoding for HSHCGI_PEA_{—}3_P12 (SEQ ID NO:1252), comprising a first amino acid sequence being at least 90% homologous to MNKNDMKSWGLLQKNNHKMNKTSEPGSSSAGGRTTSGPPNHHSSAPSHSLFRASSAG KVTFPVCLLASYDEISGQGASSQDTKTFDVALSEELHAALSEWLTAIRAWFCEVPSS corresponding to amino acids 312-425 of TM31_HUMAN (SEQ ID NO:1242), which also corresponds to amino acids 1-114 of HSHCGI_PEA_{—}3_P12 (SEQ ID NO:1252).

[3678] The location of the variant protein was determined according to results from a number of different software programs and analyses, including analyses from SignalP and other specialized programs. The variant protein is believed to be located as follows with regard to the cell: intracellularly. The protein localization is believed to be intracellularly because neither of the trans-membrane region prediction programs predicted a trans-membrane region for this protein. In addition both signal-peptide prediction programs predict that this protein is a non-secreted protein.

[3679] Variant protein HSHCGI_PEA_{—}3_P12 (SEQ ID NO:1252) is encoded by the following transcript(s): HSHCGI_PEA_{—}3_T14 (SEQ ID NO:1201), for which the sequence(s) is/are given at the end of the application. The coding portion of transcript HSHCGI_PEA_{—}3_T14 (SEQ ID NO:1201) is shown in bold; this coding portion starts at position 1795 and ends at position 2136. The transcript also has the following SNPs as listed in Table 28 (given according to their position on the nucleotide sequence, with the alternative nucleic acid listed; the last column indicates whether the SNP is known or not; the presence of known SNPs in variant protein HSHCGI_PEA_{—}3_P12 (SEQ ID NO:1252) sequence provides support for the deduced sequence of this variant protein according to the present invention).

[3680] Variant protein HSHCGI_PEA_{—}3_P13 (SEQ ID NO:1253) according to the present invention has an amino acid sequence as given at the end of the application; it is encoded by transcript(s) HSHCGI_PEA_{—}3_T17 (SEQ ID NO:1203). The location of the variant protein was determined according to results from a number of different software programs and analyses, including analyses from SignalP and other specialized programs. The variant protein is believed to be located as follows with regard to the cell: intracellularly. The protein localization is believed to be intracellularly because neither of the trans-membrane region prediction programs predicted a trans-membrane region for this protein. In addition both signal-peptide prediction programs predict that this protein is a non-secreted protein.

[3681] Variant protein HSHCGI_PEA_{—}3_P13 (SEQ ID NO:1253) is encoded by the following transcript(s): HSHCGI_PEA_{—}3_T17 (SEQ ID NO:1203), for which the sequence(s) is/are given at the end of the application. The coding portion of transcript HSHCGI_PEA_{—}3_T17 (SEQ ID NO:1203) is shown in bold; this coding portion starts at position 585 and ends at position 914. The transcript also has the following SNPs as listed in Table 29 (given according to their position on the nucleotide sequence, with the alternative nucleic acid listed; the last column indicates whether the SNP is known or not; the presence of known SNPs in variant protein HSHCGI_PEA_{—}3_P13 (SEQ ID NO:1253) sequence provides support for the deduced sequence of this variant protein according to the present invention).

[3682] Variant protein HSHCGI_PEA_{—}3_P14 (SEQ ID NO:1254) according to the present invention has an amino acid sequence as given at the end of the application; it is encoded by transcript(s) HSHCGI_PEA_{—}3_T18 (SEQ ID NO:1204). One or more alignments to one or more previously published protein sequences are given at the end of the application. A brief description of the relationship of the variant protein according to the present invention to each such aligned protein is as follows:

[3683] Comparison report between HSHCGI_PEA_{—}3_P14 (SEQ ID NO:1254) and TM31_HUMAN_V1 (SEQ ID NO:1240):

[3684] 1. An isolated chimeric polypeptide encoding for HSHCGI_PEA_{—}3_P14 (SEQ ID NO:1254), comprising a first amino acid sequence being at least 90% homologous to MASGQFVNKLQEEVICPICLDILQKPVTIDCGHNFCLKClTQIGETSCGFFKCPLCKTSVR KNAIRFNSLLRNLVEKIQALQASEVQSKRKEATCPRHQEMFHYFCEDDGKFLCFVCRES KDHKSHNVSLIEEAAQNYQGQIQEQIQVLQQKEKETVQVKAQGVHRVDVFTDQVEHE KQRILTEFELLHQVLEEEKNFLLSRIYWLGHEGTEAGKHYVASTEPQLNDLKKLVDSLK TKQNMPPRQLLEDIKVVLCRSEEFQFLNPTPVPLELEKKLSEAKSRHDSITGSLKKFKDQ LQADRKKDENRFFKSMNKNDMKS corresponding to amino acids 1-319 of TM31_HUMAN_V1 (SEQ ID NO:1240), which also corresponds to amino acids 1-319 of HSHCGI_PEA_{—}3_P14 (SEQ ID NO:1254), and a second amino acid sequence being at least 70%, optionally at least 80%, preferably at least 85%, more preferably at least 90% and most preferably at least 95% homologous to a polypeptide having the sequence CK corresponding to amino acids 320-321 of HSHCGI_PEA_{—}3_P14 (SEQ ID NO:1254), wherein said first amino acid sequence and second amino acid sequence are contiguous and in a sequential order.

[3685] It should be noted that the known protein sequence (TM31_HUMAN (SEQ ID NO:1242)) has one or more changes than the sequence given at the end of the application and named as being the amino acid sequence for TM31_HUMAN_V1 (SEQ ID NO:1240). These changes were previously known to occur and are listed in the table below.

[3686] The location of the variant protein was determined according to results from a number of different software programs and analyses, including analyses from SignalP and other specialized programs. The variant protein is believed to be located as follows with regard to the cell: intracellularly. The protein localization is believed to be intracellularly because neither of the trans-membrane region prediction programs predicted a trans-membrane region for this protein. In addition both signal-peptide prediction programs predict that this protein is a non-secreted protein.

[3687] Variant protein HSHCGI_PEA_{—}3_P14 (SEQ ID NO:1254) also has the following non-silent SNPs (Single Nucleotide Polymorphisms) as listed in Table 31, (given according to their position(s) on the amino acid sequence, with the alternative amino acid(s) listed; the last column indicates whether the SNP is known or not; the presence of known SNPs in variant protein HSHCGI_PEA_{—}3_P14 (SEQ ID NO:1254) sequence provides support for the deduced sequence of this variant protein according to the present invention).

[3688] Variant protein HSHCGI_PEA_{—}3_P14 (SEQ ID NO:1254) is encoded by the following transcript(s): HSHCGI_PEA_{—}3_T18 (SEQ ID NO:1204), for which the sequence(s) is/are given at the end of the application. The coding portion of transcript HSHCGI_PEA_{—}3_T18 (SEQ ID NO:1204) is shown in bold; this coding portion starts at position 139 and ends at position 1101. The transcript also has the following SNPs as listed in Table 32 (given according to their position on the nucleotide sequence, with the alternative nucleic acid listed; the last column indicates whether the SNP is known or not; the presence of known SNPs in variant protein HSHCGI_PEA_{—}3_P14 (SEQ ID NO:1254) sequence provides support for the deduced sequence of this variant protein according to the present invention).

[3689] Variant protein HSHCGI_PEA_{—}3_P15 (SEQ ID NO:1255) according to the present invention has an amino acid sequence as given at the end of the application; it is encoded by transcript(s) HSHCGI_PEA_{—}3_T21 (SEQ ID NO:1207). The location of the variant protein was determined according to results from a number of different software programs and analyses, including analyses from SignalP and other specialized programs. The variant protein is believed to be located as follows with regard to the cell: intracellularly. The protein localization is believed to be intracellularly because neither of the trans-membrane region prediction programs predicted a trans-membrane region for this protein. In addition both signal-peptide prediction programs predict that this protein is a non-secreted protein.

[3690] Variant protein HSHCGI_PEA_{—}3_P15 (SEQ ID NO:1255) is encoded by the following transcript(s): HSHCGI_PEA_{—}3_T21 (SEQ ID NO:1207), for which the sequence(s) is/are given at the end of the application. The coding portion of transcript HSHCGI_PEA_{—}3_T21 (SEQ ID NO:1207) is shown in bold; this coding portion starts at position 338 and ends at position 505. The transcript also has the following SNPs as listed in Table 33 (given according to their position on the nucleotide sequence, with the alternative nucleic acid listed; the last column indicates whether the SNP is known or not; the presence of known SNPs in variant protein HSHCGI_PEA_{—}3_P15 (SEQ ID NO:1255) sequence provides support for the deduced sequence of this variant protein according to the present invention).

[3691] Variant protein HSHCGI_PEA_{—}3_P16 (SEQ ID NO:1256) according to the present invention has an amino acid sequence as given at the end of the application; it is encoded by transcript(s) HSHCGI_PEA_{—}3_T23 (SEQ ID NO:1209). One or more alignments to one or more previously published protein sequences are given at the end of the application. A brief description of the relationship of the variant protein according to the present invention to each such aligned protein is as follows:

[3692] Comparison report between HSHCGI_PEA_{—}3_P16 (SEQ ID NO:1256) and TM31_HUMAN_V1:

[3693] 1. An isolated chimeric polypeptide encoding for HSHCGI_PEA_{—}3_P16 (SEQ ID NO:1256), comprising a first amino acid sequence being at least 90% homologous to MASGQFVNKLQEEVICPICLDILQKPVTIDCGHNFCLKClTQIGETSCGFFKCPLCKTSVR KNAIRFNSLLRNLVEKIQALQASEVQSKRKEATCPRHQEMFHYFCEDDGKFLCFVCRES KDHKSHNVSLIEEAAQNYQGQIQEQIQVLQQKEKETVQVKAQGVHRVDVFT corresponding to amino acids 1-171 of TM31_HUMAN_V1 (SEQ ID NO:1240), which also corresponds to amino acids 1-171 of HSHCGI_PEA_{—}3_P16 (SEQ ID NO:1256), and a second amino acid sequence being at least 70%, optionally at least 80%, preferably at least 85%, more preferably at least 90% and most preferably at least 95% homologous to a polypeptide having the sequence VRKTPSHDLWKQKHLCQSSWNPLLH (SEQ ID NO:1449) corresponding to amino acids 172-196 of HSHCGI_PEA_{—}3_P16 (SEQ ID NO:1256), wherein said first amino acid sequence and second amino acid sequence are contiguous and in a sequential order.

[3694] 2. An isolated polypeptide encoding for a tail of HSHCGI_PEA_{—}3_P16 (SEQ ID NO:1256), comprising a polypeptide being at least 70%, optionally at least about 80%, preferably at least about 85%, more preferably at least about 90% and most preferably at least about 95% homologous to the sequence VRKTPSHDLWKQKHLCQSSWNPLLH (SEQ ID NO:1449) in HSHCGI_PEA_{—}3_P16 (SEQ ID NO:1256).

[3695] It should be noted that the known protein sequence (TM31_HUMAN (SEQ ID NO:1242)) has one or more changes than the sequence given at the end of the application and named as being the amino acid sequence for TM31_HUMAN_V1 (SEQ ID NO:1240). These changes were previously known to occur and are listed in the table below.

[3696] The location of the variant protein was determined according to results from a number of different software programs and analyses, including analyses from SignalP and other specialized programs. The variant protein is believed to be located as follows with regard to the cell: intracellularly. The protein localization is believed to be intracellularly because neither of the trans-membrane region prediction programs predicted a trans-membrane region for this protein. In addition both signal-peptide prediction programs predict that this protein is a non-secreted protein.

[3697] Variant protein HSHCGI_PEA_{—}3_P16 (SEQ ID NO:1256) also has the following non-silent SNPs (Single Nucleotide Polymorphisms) as listed in Table 35, (given according to their position(s) on the amino acid sequence, with the alternative amino acid(s) listed; the last column indicates whether the SNP is known or not; the presence of known SNPs in variant protein HSHCGI_PEA_{—}3_P16 (SEQ ID NO:1256) sequence provides support for the deduced sequence of this variant protein according to the present invention).

[3698] Variant protein HSHCGI_PEA_{—}3_P16 (SEQ ID NO:1256) is encoded by the following transcript(s): HSHCGI_PEA_{—}3_T23 (SEQ ID NO:1209), for which the sequence(s) is/are given at the end of the application. The coding portion of transcript HSHCGI_PEA_{—}3_T23 (SEQ ID NO:1209) is shown in bold; this coding portion starts at position 139 and ends at position 726. The transcript also has the following SNPs as listed in Table 36 (given according to their position on the nucleotide sequence, with the alternative nucleic acid listed; the last column indicates whether the SNP is known or not; the presence of known SNPs in variant protein HSHCGI_PEA_{—}3_P16 (SEQ ID NO:1256) sequence provides support for the deduced sequence of this variant protein according to the present invention).

[3699] Variant protein HSHCGI_PEA_{—}3_P20 (SEQ ID NO:1257) according to the present invention has an amino acid sequence as given at the end of the application; it is encoded by transcript(s) HSHCGI_PEA_{—}3_T1 (SEQ ID NO:1188) and HSHCGI_PEA_{—}3_T2 (SEQ ID NO:1189). The location of the variant protein was determined according to results from a number of different software programs and analyses, including analyses from SignalP and other specialized programs. The variant protein is believed to be located as follows with regard to the cell: intracellularly. The protein localization is believed to be intracellularly because neither of the trans-membrane region prediction programs predicted a trans-membrane region for this protein. In addition both signal-peptide prediction programs predict that this protein is a non-secreted protein.

[3700] Variant protein HSHCGI_PEA_{—}3_P20 (SEQ ID NO:1257) also has the following non-silent SNPs (Single Nucleotide Polymorphisms) as listed in Table 37, (given according to their position(s) on the amino acid sequence, with the alternative amino acid(s) listed; the last column indicates whether the SNP is known or not; the presence of known SNPs in variant protein HSHCGI_PEA_{—}3_P20 (SEQ ID NO:1257) sequence provides support for the deduced sequence of this variant protein according to the present invention).

[3701] Variant protein HSHCGI_PEA_{—}3_P20 (SEQ ID NO:1257) is encoded by the following transcript(s): HSHCGI_PEA_{—}3_T1 (SEQ ID NO:1188) and HSHCGI_PEA_{—}3_T2 (SEQ ID NO:1189), for which the sequence(s) is/are given at the end of the application.

[3702] The coding portion of transcript HSHCGI_PEA_{—}3_T1 (SEQ ID NO:1188) is shown in bold; this coding portion starts at position 139 and ends at position 1413. The transcript also has the following SNPs as listed in Table 38 (given according to their position on the nucleotide sequence, with the alternative nucleic acid listed; the last column indicates whether the SNP is known or not; the presence of known SNPs in variant protein HSHCGI_PEA_{—}3_P20 (SEQ ID NO:1257) sequence provides support for the deduced sequence of this variant protein according to the present invention).

[3703] The coding portion of transcript HSHCGI_PEA_{—}3_T2 (SEQ ID NO:1189) is shown in bold; this coding portion starts at position 112 and ends at position 1386. The transcript also has the following SNPs as listed in Table 39 (given according to their position on the nucleotide sequence, with the alternative nucleic acid listed; the last column indicates whether the SNP is known or not; the presence of known SNPs in variant protein HSHCGI_PEA_{—}3_P20 (SEQ ID NO:1257) sequence provides support for the deduced sequence of this variant protein according to the present invention).

[3704] Variant protein HSHCGI_PEA_{—}3_P21 (SEQ ID NO:1258) according to the present invention has an amino acid sequence as given at the end of the application; it is encoded by transcript(s) HSHCGI_PEA_{—}3_T4 (SEQ ID NO:1191). One or more alignments to one or more previously published protein sequences are given at the end of the application. A brief description of the relationship of the variant protein according to the present invention to each such aligned protein is as follows:

[3705] Comparison report between HSHCGI_PEA_{—}3_P21 (SEQ ID NO:1258) and TM31_HUMAN:

[3706] 1. An isolated chimeric polypeptide encoding for HSHCGI_PEA_{—}3_P21 (SEQ ID NO:1258), comprising a first amino acid sequence being at least 70%, optionally at least 80%, preferably at least 85%, more preferably at least 90% and most preferably at least 95% homologous to a polypeptide having the sequence HMMSDWGNIMWIFQMSPLQNFRKEERNQ (SEQ ID NO:1450) corresponding to amino acids 1-28 of HSHCGI_PEA_{—}3_P21 (SEQ ID NO:1258), and a second amino acid sequence being at least 90% homologous to FLCFVCRESKDHKSHNVSLIEEAAQNYQGQIQEQIQVLQQKEKETVQVKAQGVHRVDV FTDQVEHEKQRILTEFELLHQVLEEEKNFLLSRIYWLGHEGTEAGKHYVASTEPQLNDL KKLVDSLKTKQNMPPRQLLEDIKVVLCRSEEFQFLNPTPVPLELEKKLSEAKSRHDSITG SLKKFKDQLQADRKKDENRFFKSMNKNDMKSWGLLQKNNHKMNKTSEPGSSSAGGR TTSGPPNHHSSAPSHSLFRASSAGKVTFPVCLLASYDEISGQGASSQDTKTFDVALSEEL HAALSEWLTAIRAWFCEVPSS corresponding to amino acids 112-425 of TM31_HUMAN (SEQ ID NO:1242), which also corresponds to amino acids 29-342 of HSHCGI_PEA_{—}3_P21 (SEQ ID NO:1258), wherein said first amino acid sequence and second amino acid sequence are contiguous and in a sequential order.

[3707] 2. An isolated polypeptide encoding for a head of HSHCGI_PEA_{—}3_P21 (SEQ ID NO:1258), comprising a polypeptide being at least 70%, optionally at least about 80%, preferably at least about 85%, more preferably at least about 90% and most preferably at least about 95% homologous to the sequence MHHSDWGNIMWIFQMSPLQNFRKEERNQ (SEQ ID NO:1450) of HSHCGI_PEA_{—}3_P21 (SEQ ID NO:1258).

[3708] The location of the variant protein was determined according to results from a number of different software programs and analyses, including analyses from SignalP and other specialized programs. The variant protein is believed to be located as follows with regard to the cell: intracellularly. The protein localization is believed to be intracellularly because neither of the trans-membrane region prediction programs predicted a trans-membrane region for this protein. In addition both signal-peptide prediction programs predict that this protein is a non-secreted protein.

[3709] Variant protein HSHCGI_PEA_{—}3_P21 (SEQ ID NO:1258) also has the following non-silent SNPs (Single Nucleotide Polymorphisms) as listed in Table 40, (given according to their position(s) on the amino acid sequence, with the alternative amino acid(s) listed; the last column indicates whether the SNP is known or not; the presence of known SNPs in variant protein HSHCGI_PEA_{—}3_P21 (SEQ ID NO:1258) sequence provides support for the deduced sequence of this variant protein according to the present invention).

[3710] Variant protein HSHCGI_PEA_{—}3_P21 (SEQ ID NO:1258) is encoded by the following transcript(s): HSHCGI_PEA_{—}3_T4 (SEQ ID NO:1191), for which the sequence(s) is/are given at the end of the application. The coding portion of transcript HSHCGI_PEA_{—}3_T4 (SEQ ID NO:1191) is shown in bold; this coding portion starts at position 252 and ends at position 1277. The transcript also has the following SNPs as listed in Table 41 (given according to their position on the nucleotide sequence, with the alternative nucleic acid listed; the last column indicates whether the SNP is known or not; the presence of known SNPs in variant protein HSHCGI_PEA_{—}3_P21 (SEQ ID NO:1258) sequence provides support for the deduced sequence of this variant protein according to the present invention).

[3711] Variant protein HSHCGI_PEA_{—}3_P22 (SEQ ID NO:1259) according to the present invention has an amino acid sequence as given at the end of the application; it is encoded by transcript(s) HSHCGI_PEA_{—}3_T6 (SEQ ID NO:1193). One or more alignments to one or more previously published protein sequences are given at the end of the application. A brief description of the relationship of the variant protein according to the present invention to each such aligned protein is as follows:

[3712] Comparison report between HSHCGI_PEA_{—}3_P22 (SEQ ID NO:1259) and TM31_HUMAN:

[3713] 1. An isolated chimeric polypeptide encoding for HSHCGI_PEA_{—}3_P22 (SEQ ID NO:1259), comprising a first amino acid sequence being at least 90% homologous to MPPRQLLEDIKVVLCRSEEFQFLNPTPVPLELEKKLSEAKSRHDSITGSLKKFKDQLQAD RKKDENRFFKSMNKNDMKSWGLLQKNNHKMNKTSEPGSSSAGGRTTSGPPNHHSSAP SHSLFRASSAGKVTFPVCLLASYDEISGQGASSQDTKTFDVALSEELHAALSEWLTAIRA WFCEVPSS corresponding to amino acids 241-425 of TM31_HUMAN (SEQ ID NO:1242), which also corresponds to amino acids 1-185 of HSHCGI_PEA_{—}3_P22 (SEQ ID NO:1259).

[3714] The location of the variant protein was determined according to results from a number of different software programs and analyses, including analyses from SignalP and other specialized programs. The variant protein is believed to be located as follows with regard to the cell: intracellularly. The protein localization is believed to be intracellularly because neither of the trans-membrane region prediction programs predicted a trans-membrane region for this protein. In addition both signal-peptide prediction programs predict that this protein is a non-secreted protein.

[3715] Variant protein HSHCGI_PEA_{—}3_P22 (SEQ ID NO:1259) also has the following non-silent SNPs (Single Nucleotide Polymorphisms) as listed in Table 42, (given according to their position(s) on the amino acid sequence, with the alternative amino acid(s) listed; the last column indicates whether the SNP is known or not; the presence of known SNPs in variant protein HSHCGI_PEA_{—}3_P22 (SEQ ID NO:1259) sequence provides support for the deduced sequence of this variant protein according to the present invention).

[3716] Variant protein HSHCGI_PEA_{—}3_P22 (SEQ ID NO:1259) is encoded by the following transcript(s): HSHCGI_PEA_{—}3_T6 (SEQ ID NO:1193), for which the sequence(s) is/are given at the end of the application. The coding portion of transcript HSHCGI_PEA_{—}3_T6 (SEQ ID NO:1193) is shown in bold; this coding portion starts at position 413 and ends at position 967. The transcript also has the following SNPs as listed in Table 43 (given according to their position on the nucleotide sequence, with the alternative nucleic acid listed; the last column indicates whether the SNP is known or not; the presence of known SNPs in variant protein HSHCGI_PEA_{—}3_P22 (SEQ ID NO:1259) sequence provides support for the deduced sequence of this variant protein according to the present invention).

[3717] As noted above, cluster HSHCGI features 29 segment(s), which were listed in Table 2 above and for which the sequence(s) are given at the end of the application. These segment(s) are portions of nucleic acid sequence(s) which are described herein separately because they are of particular interest. A description of each segment according to the present invention is now provided.

[3718] Segment cluster HSHCGI_PEA_{—}3_node_{—}0 (SEQ ID NO:1211) according to the present invention is supported by 3 libraries. The number of libraries was determined as previously described. This segment can be found in the following transcript(s): HSHCGI_PEA_{—}3_T21 (SEQ ID NO:1207) and HSHCGI_PEA_{—}3_T22 (SEQ ID NO:1208). Table 44 below describes the starting and ending position of this segment on each transcript.

[3719] Segment cluster HSHCGI_PEA_{—}3_node_{—}2 (SEQ ID NO:1212) according to the present invention is supported by 6 libraries. The number of libraries was determined as previously described. This segment can be found in the following transcript(s): HSHCGI_PEA_{—}3_T21 (SEQ ID NO:1207) and HSHCGI_PEA_{—}3_T22 (SEQ ID NO:1208). Table 45 below describes the starting and ending position of this segment on each transcript.

[3720] Segment cluster HSHCGI_PEA_{—}3_node_{—}7 (SEQ ID NO:1213) according to the present invention is supported by 27 libraries. The number of libraries was determined as previously described. This segment can be found in the following transcript(s): HSHCGI_PEA_{—}3_T0 (SEQ ID NO:1187), HSHCGI_PEA_{—}3_T1 (SEQ ID NO:1188), HSHCGI_PEA_{—}3_T2 (SEQ ID NO:1189), HSHCGI_PEA_{—}3_T3 (SEQ ID NO:1190), HSHCGI_PEA_{—}3_T4 (SEQ ID NO:1191), HSHCGI_PEA_{—}3_T5 (SEQ ID NO:1192), HSHCGI_PEA_{—}3_T7 (SEQ ID NO:1194), HSHCGI_PEA_{—}3_T8 (SEQ ID NO:1195), HSHCGI_PEA_{—}3_T9 (SEQ ID NO:1196), HSHCGI_PEA_{—}3_T10 (SEQ ID NO:1197), HSHCGI_PEA_{—}3_T11 (SEQ ID NO:1198), HSHCGI_PEA_{—}3_T12 (SEQ ID NO:1199), HSHCGI_PEA_{—}3_T13 (SEQ ID NO:1200), HSHCGI_PEA_{—}3_T18 (SEQ ID NO:1204) and HSHCGI_PEA_{—}3_T23 (SEQ ID NO:1209). Table 46 below describes the starting and ending position of this segment on each transcript.

[3721] Segment cluster HSHCGI_PEA_{—}3_node_{—}8 (SEQ ID NO:1214) according to the present invention is supported by 26 libraries. The number of libraries was determined as previously described. This segment can be found in the following transcript(s): HSHCGI_PEA_{—}3_T0 (SEQ ID NO:1187), HSHCGI_PEA_{—}3_T1 (SEQ ID NO:1188), HSHCGI_PEA_{—}3_T2 (SEQ ID NO:1189), HSHCGI_PEA_{—}3_T3 (SEQ ID NO:1190), HSHCGI_PEA_{—}3_T5 (SEQ ID NO:1192), HSHCGI_PEA_{—}3_T7 (SEQ ID NO:1194), HSHCGI_PEA_{—}3_T8 (SEQ ID NO:1195), HSHCGI_PEA_{—}3_T9 (SEQ ID NO:1196), HSHCGI_PEA_{—}3_T10 (SEQ ID NO:1197), HSHCGI_PEA_{—}3_T11 (SEQ ID NO:1198), HSHCGI_PEA_{—}3_T12 (SEQ ID NO:1199), HSHCGI_PEA_{—}3_T13 (SEQ ID NO:1200), HSHCGI_PEA_{—}3_T18 (SEQ ID NO:1204) and HSHCGI_PEA_{—}3_T23 (SEQ ID NO:1209). Table 47 below describes the starting and ending position of this segment on each transcript.

[3722] Segment cluster HSHCGI_PEA_{—}3_node_{—}14 (SEQ ID NO:1215) according to the present invention is supported by 2 libraries. The number of libraries was determined as previously described. This segment can be found in the following transcript(s): HSHCGI_PEA_{—}3_T23 (SEQ ID NO:1209). Table 48 below describes the starting and ending position of this segment on each transcript.

[3723] Segment cluster HSHCGI_PEA_{—}3_node_{—}16 (SEQ ID NO:1216) according to the present invention is supported by 43 libraries. The number of libraries was determined as previously described. This segment can be found in the following transcript(s): HSHCGI_PEA_{—}3_T0 (SEQ ID NO:1187), HSHCGI_PEA_{—}3_T1 (SEQ ID NO:1188), HSHCGI_PEA_{—}3_T2 (SEQ ID NO:1189, HSHCGI_PEA_{—}3_T3 (SEQ ID NO:1190), HSHCGI_PEA_{—}3_T4 (SEQ ID NO:1191), HSHCGI_PEA_{—}3_T5 (SEQ ID NO:1192), HSHCGI_PEA_{—}3_T6 (SEQ ID NO:1193), HSHCGI_PEA_{—}3_T7 (SEQ ID NO:1194), HSHCGI_PEA_{—}3_T8 (SEQ ID NO:1195), HSHCGI_PEA_{—}3_T9 (SEQ ID NO:1196), HSHCGI_PEA_{—}3_T10 (SEQ ID NO:1197), HSHCGI_PEA_{—}3_T11 (SEQ ID NO:1198), HSHCGI_PEA_{—}3_T12 (SEQ ID NO:1199), HSHCGI_PEA_{—}3_T13 (SEQ ID NO:1200) and HSHCGI_PEA_{—}3_T18 (SEQ ID NO:1204). Table 49 below describes the starting and ending position of this segment on each transcript.

[3724] Segment cluster HSHCGI_PEA_{—}3_node_{—}18 (SEQ ID NO:1217) according to the present invention is supported by 4 libraries. The number of libraries was determined as previously described. This segment can be found in the following transcript(s): HSHCGI_PEA_{—}3_T14 (SEQ ID NO:1201). Table 50 below describes the starting and ending position of this segment on each transcript.

[3725] Segment cluster HSHCGI_PEA_{—}3_node_{—}20 (SEQ ID NO:1218) according to the present invention is supported by 11 libraries. The number of libraries was determined as previously described. This segment can be found in the following transcript(s): HSHCGI_PEA_{—}3_T5 (SEQ ID NO:1192), HSHCGI_PEA_{—}3_T12 (SEQ ID NO:1199) and HSHCGI_PEA_{—}3_T14 (SEQ ID NO:1201). Table 51 below describes the starting and ending position of this segment on each transcript.

[3726] Segment cluster HSHCGI_PEA_{—}3_node_{—}26 (SEQ ID NO:1219) according to the present invention is supported by 5 libraries. The number of libraries was determined as previously described. This segment can be found in the following transcript(s): HSHCGI_PEA_{—}3_T15 (SEQ ID NO:1202), HSHCGI_PEA_{—}3_T19 (SEQ ID NO:1205), HSHCGI_PEA_{—}3_T20 (SEQ ID NO:1206) and HSHCGI_PEA_{—}3_T24 (SEQ ID NO:1210). Table 52 below describes the starting and ending position of this segment on each transcript.

[3727] Segment cluster HSHCGI_PEA_{—}3_node_{—}28 (SEQ ID NO:1220) according to the present invention is supported by 3 libraries. The number of libraries was determined as previously described. This segment can be found in the following transcript(s): HSHCGI_PEA_{—}3_T18 (SEQ ID NO:1204) and HSHCGI_PEA_{—}3_T24 (SEQ ID NO:1210). Table 53 below describes the starting and ending position of this segment on each transcript.

[3728] Segment cluster HSHCGI_PEA_{—}3_node_{—}30 (SEQ ID NO:1221) according to the present invention is supported by 3 libraries. The number of libraries was determined as previously described. This segment can be found in the following transcript(s): HSHCGI_PEA_{—}3_T17 (SEQ ID NO:1203). Table 54 below describes the starting and ending position of this segment on each transcript.

[3729] Segment cluster HSHCGI_PEA_{—}3_node_{—}32 (SEQ ID NO:1222) according to the present invention is supported by 7 libraries. The number of libraries was determined as previously described. This segment can be found in the following transcript(s): HSHCGI_PEA_{—}3_T9 (SEQ ID NO:1196), HSHCGI_PEA_{—}3_T12 (SEQ ID NO:1199), HSHCGI_PEA_{—}3_T17 (SEQ ID NO:1203) and HSHCGI_PEA_{—}3_T19 (SEQ ID NO:1205). Table 55 below describes the starting and ending position of this segment on each transcript.

[3730] Segment cluster HSHCGI_PEA_{—}3_node_{—}33 (SEQ ID NO:1223) according to the present invention is supported by 50 libraries. The number of libraries was determined as previously described. This segment can be found in the following transcript(s): HSHCGI_PEA_{—}3_T0 (SEQ ID NO:1187, HSHCGI_PEA_{—}3_T1 (SEQ ID NO:1188), HSHCGI_PEA_{—}3_T2 (SEQ ID NO:1189), HSHCGI_PEA_{—}3_T3 (SEQ ID NO:1190), HSHCGI_PEA_{—}3_T4 (SEQ ID NO:1191), HSHCGI_PEA_{—}3_T5 (SEQ ID NO:1192), HSHCGI_PEA_{—}3_T6 (SEQ ID NO:1193), HSHCGI_PEA_{—}3_T7 (SEQ ID NO:1194), HSHCGI_PEA_{—}3_T8 (SEQ ID NO:1195), HSHCGI_PEA_{—}3_T9 (SEQ ID NO:1196), HSHCGI_PEA_{—}3_T10 (SEQ ID NO:1197), HSHCGI_PEA_{—}3_T11 (SEQ ID NO:1198), HSHCGI_PEA_{—}3_T12 (SEQ ID NO:1199), HSHCGI_PEA_{—}3_T13 (SEQ ID NO:1200), HSHCGI_PEA_{—}3_T14 (SEQ ID NO:1201), HSHCGI_PEA_{—}3_T15 (SEQ ID NO:1202), HSHCGI_PEA_{—}3_T17 (SEQ ID NO:1203), HSHCGI_PEA_{—}3_T19 (SEQ ID NO:1205) and HSHCGI_PEA_{—}3_T20 (SEQ ID NO:1206). Table 56 below describes the starting and ending position of this segment on each transcript.

[3731] Segment cluster HSHCGI_PEA_{—}3_node_{—}34 (SEQ ID NO:1224) according to the present invention is supported by 32 libraries. The number of libraries was determined as previously described. This segment can be found in the following transcript(s): HSHCGI_PEA_{—}3_T0 (SEQ ID NO:1187), HSHCGI_PEA_{—}3_T1 (SEQ ID NO:1188), HSHCGI_PEA_{—}3_T2 (SEQ ID NO:1189), HSHCGI_PEA_{—}3_T4(SEQ ID NO:1191), HSHCGI_PEA_{—}3_T5(SEQ ID NO:1192), HSHCGI_PEA_{—}3_T6 (SEQ ID NO:1193), HSHCGI_PEA_{—}3_T7 (SEQ ID NO:1194), HSHCGI_PEA_{—}3_T8 (SEQ ID NO:1195), HSHCGI_PEA_{—}3_T9 (SEQ ID NO:1196), HSHCGI_PEA_{—}3_T10 (SEQ ID NO:1197), HSHCGI_PEA_{—}3_T11 (SEQ ID NO:1198), HSHCGI_PEA_{—}3_T12 (SEQ ID NO:1199), HSHCGI_PEA_{—}3_T13 (SEQ ID NO:1200), HSHCGI_PEA_{—}3_T14 (SEQ ID NO:1201), HSHCGI_PEA_{—}3_T15 (SEQ ID NO:1202), HSHCGI_PEA_{—}3_T17(SEQ ID NO:1203) and HSHCGI_PEA_{—}3_T19(SEQ ID NO:1205). Table 57 below describes the starting and ending position of this segment on each transcript.

[3732] Segment cluster HSHCGI_PEA_{—}3_node_{—}36 (SEQ ID NO:1225) according to the present invention is supported by 38 libraries. The number of libraries was determined as previously described. This segment can be found in the following transcript(s): HSHCGI_PEA_{—}3_T0 (SEQ ID NO:1187), HSHCGI_PEA_{—}3_T1 (SEQ ID NO:1188), HSHCGI_PEA_{—}3_T2 (SEQ ID NO:1189), HSHCGI_PEA_{—}3_T3 (SEQ ID NO:1190), HSHCGI_PEA_{—}3_T4 (SEQ ID NO:1191), HSHCGI_PEA_{—}3_T5 (SEQ ID NO:1192), HSHCGI_PEA_{—}3_T6 (SEQ ID NO:1193), HSHCGI_PEA_{—}3_T7 (SEQ ID NO:1194), HSHCGI_PEA_{—}3_T8 (SEQ ID NO:1195), HSHCGI_PEA_{—}3_T9(SEQ ID NO:1196), HSHCGI_PEA_{—}3_T10 (SEQ ID NO:1197), HSHCGI_PEA_{—}3_T11 (SEQ ID NO:1198), HSHCGI_PEA_{—}3_T12 (SEQ ID NO:1199), HSHCGI_PEA_{—}3_T13 (SEQ ID NO:1200), HSHCGI_PEA_{—}3_T14 (SEQ ID NO:1201), HSHCGI_PEA_{—}3_T15 (SEQ ID NO:1202), HSHCGI_PEA_{—}3_T17 (SEQ ID NO:1203), HSHCGI_PEA_{—}3_T19 (SEQ ID NO:1205) and HSHCGI_PEA_{—}3_T20 (SEQ ID NO:1206). Table 58 below describes the starting and ending position of this segment on each transcript.

[3733] According to an optional embodiment of the present invention, short segments related to the above cluster are also provided. These segments are up to about 120 bp in length, and so are included in a separate description.

[3734] Segment cluster HSHCGI_PEA_{—}3_node_{—}1 (SEQ ID NO:1226) according to the present invention is supported by 0 libraries. The number of libraries was determined as previously described. This segment can be found in the following transcript(s): HSHCGI_PEA_{—}3_T0 (SEQ ID NO:1187), HSHCGI_PEA_{—}3_T11 (SEQ ID NO:1198) and HSHCGI_PEA_{—}3_T13 (SEQ ID NO:1200). Table 59 below describes the starting and ending position of this segment on each transcript.

[3735] Segment cluster HSHCGI_PEA_{—}3_node_{—}4 (SEQ ID NO:1227) according to the present invention is supported by 4 libraries. The number of libraries was determined as previously described. This segment can be found in the following transcript(s): HSHCGI_PEA_{—}3_T2 (SEQ ID NO:1189). Table 60 below describes the starting and ending position of this segment on each transcript.

[3736] Segment cluster HSHCGI_PEA_{—}3_node_{—}6 (SEQ ID NO:1228) according to the present invention is supported by 3 libraries. The number of libraries was determined as previously described. This segment can be found in the following transcript(s): HSHCGI_PEA_{—}3_T1 (SEQ ID NO:1188), HSHCGI_PEA_{—}3_T3 (SEQ ID NO:1190), HSHCGI_PEA_{—}3_T4 (SEQ ID NO:1191), HSHCGI_PEA_{—}3_T5 (SEQ ID NO:1192), HSHCGI_PEA_{—}3_T7 (SEQ ID NO:1194), HSHCGI_PEA_{—}3_T8 (SEQ ID NO:1195), HSHCGI_PEA_{—}3_T9 (SEQ ID NO:1196), HSHCGI_PEA_{—}3_T10 (SEQ ID NO:1197), HSHCGI_PEA_{—}3_T12 (SEQ ID NO:1199), HSHCGI_PEA_{—}3_T18 (SEQ ID NO:1204) and HSHCGI_PEA_{—}3_T23 (SEQ ID NO:1209). Table 61 below describes the starting and ending position of this segment on each transcript.

[3737] Segment cluster HSHCGI_PEA_{—}3_node_{—}9 (SEQ ID NO:1229) according to the present invention is supported by 32 libraries. The number of libraries was determined as previously described. This segment can be found in the following transcript(s): HSHCGI_PEA_{—}3_T0 (SEQ ID NO:1187), HSHCGI_PEA_{—}3_T1 (SEQ ID NO:1188), HSHCGI_PEA_{—}3_T2 (SEQ ID NO:1189), HSHCGI_PEA_{—}3_T3 (SEQ ID NO:1190), HSHCGI_PEA_{—}3_T4 (SEQ ID NO:11911, HSHCGI_PEA_{—}3_T5 (SEQ ID NO:1192), HSHCGI_PEA_{—}3_T7 (SEQ ID NO:1194), HSHCGI_PEA_{—}3_T8 (SEQ ID NO:1195), HSHCGI_PEA_{—}3_T9 (SEQ ID NO:1196), HSHCGI_PEA_{—}3_T10 (SEQ ID NO:1197), HSHCGI_PEA_{—}3_T11 (SEQ ID NO:1198), HSHCGI_PEA_{—}3_T12(SEQ ID NO:1199), HSHCGI_PEA_{—}3_T13(SEQ ID NO:1200), HSHCGI_PEA_{—}3_T18 (SEQ ID NO:1204) and HSHCGI_PEA_{—}3_T23 (SEQ ID NO:1209). Table 62 below describes the starting and ending position of this segment on each transcript.

[3738] Segment cluster HSHCGI_PEA_{—}3_node_{—}11 (SEQ ID NO:1230) according to the present invention is supported by 1 libraries. The number of libraries was determined as previously described. This segment can be found in the following transcript(s): HSHCGI_PEA_{—}3_T6 (SEQ ID NO:1193). Table 63 below describes the starting and ending position of this segment on each transcript.

[3739] Segment cluster HSHCGI_PEA_{—}3_node_{—}13 (SEQ ID NO:1231) according to the present invention is supported by 35 libraries. The number of libraries was determined as previously described. This segment can be found in the following transcript(s): HSHCGI_PEA_{—}3_T0 (SEQ ID NO:1187), HSHCGI_PEA_{—}3_T1 (SEQ ID NO:1188), HSHCGI_PEA_{—}3_T2 (SEQ ID NO:1189), HSHCGI_PEA_{—}3_T3 (SEQ ID NO:1190), HSHCGI_PEA_{—}3_T4 (SEQ ID NO: 1191), HSHCGI_PEA_{—}3_T5 (SEQ ID NO:1192), HSHCGI_PEA_{—}3_T6 (SEQ ID NO:1193), HSHCGI_PEA_{—}3_T7 (SEQ ID NO:1194), HSHCGI_PEA_{—}3_T8 (SEQ ID NO:1195), HSHCGI_PEA_{—}3_T9 (SEQ ID NO:1196), HSHCGI_PEA_{—}3_T10 (SEQ ID NO:1197), HSHCGI_PEA_{—}3_T11 (SEQ ID NO:1198), HSHCGI_PEA_{—}3_T12 (SEQ ID NO:1199), HSHCGI_PEA_{—}3_T13 (SEQ ID NO:1200), HSHCGI_PEA_{—}3_T18 (SEQ ID NO:1204) and HSHCGI_PEA_{—}3_T23 (SEQ ID NO:1209). Table 64 below describes the starting and ending position of this segment on each transcript.

[3740] Segment cluster HSHCGI_PEA_{—}3_node_{—}19 (SEQ ID NO:1232) according to the present invention can be found in the following transcript(s): HSHCGI_PEA_{—}3_T0 (SEQ ID NO:1187) 5, HSHCGI_PEA_{—}3_T1 (SEQ ID NO:1188), HSHCGI_PEA_{—}3_T2 (SEQ ID NO:1189), HSHCGI_PEA_{—}3_T3 (SEQ ID NO:1190), HSHCGI_PEA_{—}3_T4 (SEQ ID NO:1191), HSHCGI_PEA_{—}3_T5 (SEQ ID NO:1192), HSHCGI_PEA_{—}3_T6 (SEQ ID NO:1193), HSHCGI_PEA_{—}3_T7 (SEQ ID NO:1194), HSHCGI_PEA_{—}3_T8 (SEQ ID NO:1195), HSHCGI_PEA_{—}3_T9(SEQ ID NO:1196), HSHCGI_PEA_{—}3_T10(SEQ ID NO:1197), HSHCGI_PEA_{—}3_T12 (SEQ ID NO:1199), HSHCGI_PEA_{—}3_T14(SEQ ID NO:1201) and HSHCGI_PEA_{—}3_T18 (SEQ ID NO:1204). Table 65 below describes the starting and ending position of this segment on each transcript.

[3741] Segment cluster HSHCGI_PEA_{—}3_node_{—}21 (SEQ ID NO:1233) according to the present invention can be found in the following transcript(s): HSHCGI_PEA_{—}3_T13 (SEQ ID NO: 1200). Table 66 below describes the starting and ending position of this segment on each transcript.

[3742] Segment cluster HSHCGI_PEA_{—}3_node_{—}22 (SEQ ID NO:1234) according to the present invention is supported by 6 libraries. The number of libraries was determined as previously described. This segment can be found in the following transcript(s): HSHCGI_PEA_{—}3_T5 (SEQ ID NO:1192), HSHCGI_PEA_{—}3_T8 (SEQ ID NO:1195), HSHCGI_PEA_{—}3_T12 (SEQ ID NO:199) and HSHCGI_PEA_{—}3_T14 (SEQ ID NO:1201). Table 67 below describes the starting and ending position of this segment on each transcript.

[3743] Segment cluster HSHCGI_PEA_{—}3_node_{—}23 (SEQ ID NO:1235) according to the present invention is supported by 30 libraries. The number of libraries was determined as previously described. This segment can be found in the following transcript(s): HSHCGI_PEA_{—}3_T0 (SEQ ID NO:1187), HSHCGI_PEA_{—}3_T1 (SEQ ID NO:1188), HSHCGI_PEA_{—}3_T2 (SEQ ID NO:1189), HSHCGI_PEA_{—}3_T3 (SEQ ID NO:1190), HSHCGI_PEA_{—}3_T4 (SEQ ID NO:1191), HSHCGI_PEA_{—}3_T5 (SEQ ID NO:1192), HSHCGI_PEA_{—}3_T6 (SEQ ID NO:1193), HSHCGI_PEA_{—}3_T8 (SEQ ID NO:1195), HSHCGI_PEA_{—}3_T9 (SEQ ID NO:1196), HSHCGI_PEA_{—}3_T12 (SEQ ID NO:1199), HSHCGI_PEA_{—}3_T13 (SEQ ID NO:1200), HSHCGI_PEA_{—}3_T14(SEQ ID NO:1201) and HSHCGI_PEA_{—}3_T18(SEQ ID NO:1204). Table 68 below describes the starting and ending position of this segment on each transcript.

[3744] Segment cluster HSHCGI_PEA_{—}3_node_{—}24 (SEQ ID NO:1236) according to the present invention is supported by 38 libraries. The number of libraries was determined as previously described. This segment can be found in the following transcript(s): HSHCGI_PEA_{—}3_T0 (SEQ ID NO:1187), HSHCGI_PEA_{—}3_T1 (SEQ ID NO:1188), HSHCGI_PEA_{—}3_T2 (SEQ ID NO:1189), HSHCGI_PEA_{—}3_T3 (SEQ ID NO:1190), HSHCGI_PEA_{—}3_T4 (SEQ ID NO:1191), HSHCGI_PEA_{—}3_T5 (SEQ ID NO:1192), HSHCGI_PEA_{—}3_T6 (SEQ ID NO:1193), HSHCGI_PEA_{—}3_T8 (SEQ ID NO:1195), HSHCGI_PEA_{—}3_T9 (SEQ ID NO:1196), HSHCGI_PEA_{—}3_T10 (SEQ ID NO:1197), HSHCGI_PEA_{—}3_T11 (SEQ ID NO:1198), HSHCGI_PEA_{—}3_T12 (SEQ ID NO:1199), HSHCGI_PEA_{—}3_T13 (SEQ ID NO:1200), HSHCGI_PEA_{—}3_T14 (SEQ ID NO:1201) and HSHCGI_PEA_{—}3_T18 (SEQ ID NO:1204). Table 69 below describes the starting and ending position of this segment on each transcript.

[3745] Segment cluster HSHCGI_PEA_{—}3_node_{—}27 (SEQ ID NO:1237) according to the present invention is supported by 43 libraries. The number of libraries was determined as previously described. This segment can be found in the following transcript(s): HSHCGI_PEA_{—}3_T0 (SEQ ID NO:1187), HSHCGI_PEA_{—}3_T1 (SEQ ID NO:1188), HSHCGI_PEA_{—}3_T2 (SEQ ID NO:1189), HSHCGI_PEA_{—}3_T3 (SEQ ID NO:1190), HSHCGI_PEA_{—}3_T4 (SEQ ID NO:1191), HSHCGI_PEA_{—}3_T5 (SEQ ID NO:1192), HSHCGI_PEA_{—}3_T6 (SEQ ID NO:1193), HSHCGI_PEA_{—}3_T7 (SEQ ID NO:1194), HSHCGI_PEA_{—}3_T8 (SEQ ID NO:1195), HSHCGI_PEA_{—}3_T9 (SEQ ID NO:1196), HSHCGI_PEA_{—}3_T10 (SEQ ID NO:1197), HSHCGI_PEA_{—}3_T11 (SEQ ID NO:1198), HSHCGI_PEA_{—}3_T12 (SEQ ID NO:1199), HSHCGI_PEA_{—}3_T13 (SEQ ID NO:1200), HSHCGI_PEA_{—}3_T14 (SEQ ID NO:1201), HSHCGI_PEA_{—}3_T15 (SEQ ID NO:1202), HSHCGI_PEA_{—}3_T18 (SEQ ID NO:1204), HSHCGI_PEA_{—}3_T19 (SEQ ID NO:1205), HSHCGI_PEA_{—}3_T20 (SEQ ID NO:1206) and HSHCGI_PEA_{—}3_T24 (SEQ ID NO:1210). Table 70 below describes the starting and ending position of this segment on each transcript.

[3746] Segment cluster HSHCGI_PEA_{—}3_node_{—}31 (SEQ ID NO:1238) according to the present invention is supported by 34 libraries. The number of libraries was determined as previously described. This segment can be found in the following transcript(s): HSHCGI_PEA_{—}3_T0 (SEQ ID NO:1187), HSHCGI_PEA_{—}3_T1 (SEQ ID NO:1188), HSHCGI_PEA_{—}3_T2 (SEQ ID NO:1189), HSHCGI_PEA_{—}3_T3 (SEQ ID NO:1190), HSHCGI_PEA_{—}3_T4 (SEQ ID NO:1191), HSHCGI_PEA_{—}3_T5 (SEQ ID NO:1192), HSHCGI_PEA_{—}3_T6 (SEQ ID NO:1193), HSHCGI_PEA_{—}3_T7 (SEQ ID NO:1194), HSHCGI_PEA_{—}3_T8 (SEQ ID NO:1195), HSHCGI_PEA_{—}3_T9 (SEQ ID NO:1196), HSHCGI_PEA_{—}3_T10 (SEQ ID NO:1197), HSHCGI_PEA_{—}3_T11 (SEQ ID NO:1198), HSHCGI_PEA_{—}3_T12 (SEQ ID NO:1199), HSHCGI_PEA_{—}3_T13 (SEQ ID NO:1200), HSHCGI_PEA_{—}3_T14 (SEQ ID NO:1201), HSHCGI_PEA_{—}3_T15 (SEQ ID NO:1202), HSHCGI_PEA_{—}3_T17 (SEQ ID NO:1203, HSHCGI_PEA_{—}3_T19 (SEQ ID NO:1205) and HSHCGI_PEA_{—}3_T20 (SEQ ID NO:1206). Table 71 below describes the starting and ending position of this segment on each transcript.

[3747] Segment cluster HSHCGI_PEA_{—}3_node_{—}35 (SEQ ID NO:1239) according to the present invention is supported by 38 libraries. The number of libraries was determined as previously described. This segment can be found in the following transcript(s): HSHCGI_PEA_{—}3_T0 (SEQ ID NO:1187), HSHCGI_PEA_{—}3_T1 (SEQ ID NO:1188), HSHCGI_PEA_{—}3_T2 (SEQ ID NO:1189), HSHCGI_PEA_{—}3_T3 (SEQ ID NO:1190), HSHCGI_PEA_{—}3_T4 (SEQ ID NO:1191), HSHCGI_PEA_{—}3_T5 (SEQ ID NO:1192), HSHCGI_PEA_{—}3_T6 (SEQ ID NO:1193), HSHCGI_PEA_{—}3_T7 (SEQ ID NO:1194), HSHCGI_PEA_{—}3_T8 (SEQ ID NO:1195), HSHCGI_PEA_{—}3_T9 (SEQ ID NO:1196), HSHCGI_PEA_{—}3_T10 (SEQ ID NO:1197), HSHCGI_PEA_{—}3_T11 (SEQ ID NO:1198), HSHCGI_PEA_{—}3_T12 (SEQ ID NO:1199), HSHCGI_PEA_{—}3_T13 (SEQ ID NO:1200), HSHCGI_PEA_{—}3_T14 (SEQ ID NO:1201), HSHCGI_PEA_{—}3_T15 (SEQ ID NO:1202), HSHCGI_PEA_{—}3_T17 (SEQ ID NO:1203), HSHCGI_PEA_{—}3_T19 (SEQ ID NO:1205) and HSHCGI_PEA_{—}3_T20 (SEQ ID NO: 1206). Table 72 below describes the starting and ending position of this segment on each transcript.

Variant protein alignment to the previously known protein:

Sequence name: TM31_HUMAN (SEQ ID NO:1242)

Sequence Documentation:

Alignment of: HSHCGI_PEA_{—}3_P17 (SEQ ID NO:1243)×TM31_HUMAN (SEQ ID NO:1242) ••

Alignment segment 1/1:

Alignment:

Sequence name: TM31_HUMAN_V2 (SEQ ID NO:1241)

Sequence Documentation:

Alignment of: HSHCGI_PEA_{—}3_P19 (SEQ ID NO:1245)×TM31_HUMAN_V2 (SEQ ID NO:1241) ••

Alignment segment 1/1:

Alignment:

Sequence name: TM31_HUMAN_V1 (SEQ ID NO:1240)

Sequence Documentation:

Alignment of: HSHCGI_PEA_{—}3_P4 (SEQ ID NO:1247)×TM31_HUMAN_V1 (SEQ ID NO:1240) ••

Alignment segment 1/1:

Alignment:

Sequence name: TM31_HUMAN_V1 (SEQ ID NO:1240)

Sequence Documentation:

Alignment of: HSHCGI_PEA_{—}3_P6 (SEQ ID NO:1248)×TM31_HUMAN_V1 (SEQ ID NO:1240) ••

Alignment segment 1/1:

Alignment:

Sequence name: TM31_HUMAN_V1 (SEQ ID NO:1240)

Sequence Documentation:

Alignment of: HSHCGI_PEA_{—}3_P7 (SEQ ID NO:1249)×TM31_HUMAN_V1 (SEQ ID NO:1240) ••

Alignment segment 1/1:

Alignment:

Sequence name: TM31_HUMAN_V1 (SEQ ID NO:1240)

Sequence Documentation:

Alignment of: HSHCGI_PEA_{—}3_P8 (SEQ ID NO:1250)×TM31_HUMAN_V1 (SEQ ID NO:1240) ••

Alignment segment 1/1:

Alignment:

Sequence name: TM31_HUMAN_V1 (SEQ ID NO:1240)

Sequence Documentation:

Alignment of: HSHCGI_PEA_{—}3_P9 (SEQ ID NO:1251)×TM31_HUMAN_V1 (SEQ ID NO:1240) ••

Alignment segment 1/1:

Alignment:

Sequence name: TM31_HUMAN (SEQ ID NO:1242)

Sequence Documentation:

Alignment of: HSHCGI_PEA_{—}3_P12 (SEQ ID NO:1252)×TM31_HUMAN (SEQ ID NO:1242) ••

Alignment segment 1/1:

Alignment:

Sequence name: TM31_HUMAN_V1 (SEQ ID NO:1240)

Sequence Documentation:

Alignment of: HSHCGI_PEA_{—}3_P14 (SEQ ID NO:1254)×TM31_HUMAN_V1 (SEQ ID NO:1240) ••

Alignment segment 1/1:

Alignment:

Sequence name: TM31_HUMAN_V1 (SEQ ID NO:1240)

Sequence Documentation:

Alignment of: HSHCGI_PEA_{—}3_P16 (SEQ ID NO:1256)×TM31HUMAN_V1 (SEQ ID NO:1240) ••

Alignment segment 1/1:

Alignment:

Sequence name: TM31_HUMAN (SEQ ID NO:1242)

Sequence Documentation:

Alignment of: HSHCGI_PEA_{—}3_P21 (SEQ ID NO:1258)×TM31_HUMAN (SEQ ID NO:1242) ••

Alignment segment 1/1:

Alignment:

Sequence name: TM31_HUMAN (SEQ ID NO:1242)

Sequence Documentation:

Alignment of: HSHCGI_PEA_{—}3_P22 (SEQ ID NO:1259)×TM31_HUMAN (SEQ ID NO:1242) ••

Alignment segment 1/1:

Alignment:

[3748] Expression of TRIM31 tripartite motif HSHCGI transcripts which are detectable by amplicon as depicted in sequence name HSHCGIseg20 (SEQ ID NO:1378) in normal and cancerous colon tissues

[3749] Expression of TRIM31 tripartite motif transcripts detectable by or according to seg20, HSHCGIseg20 amplicon (SEQ ID NO:1378) and HSHCGIseg20F (SEQ ID NO:1376) HSHCGIseg20R (SEQ ID NO:1377) primers was measured by real time PCR. In parallel the expression of four housekeeping genes—PBGD (GenBank Accession No. BC019323 (SEQ ID NO:1576); amplicon—PBGD-amplicon, SEQ ID NO:531), HPRT1 (GenBank Accession No. NM_{—}000194 (SEQ ID NO:1577); amplicon—HPRT1-amplicon, SEQ ID NO:612), G6PD (GenBank Accession No. NM_{—}000402 (SEQ ID NO:1578); G6PD amplicon, SEQ ID NO:615), RPS27A (GenBank Accession No. NM_{—}002954 (SEQ ID NO:1579); RPS27A amplicon, SEQ ID NO:1261), was measured similarly. For each RT sample, the expression of the above amplicon was normalized to the geometric mean of the quantities of the housekeeping genes. The normalized quantity of each RT sample was then divided by the median of the quantities of the normal post-mortem (PM) samples (Sample Nos. 41, 52, 62-67, 69-71, Table 1, above, “Tissue samples in testing samples”), to obtain a value of fold up-regulation for each sample relative to median of the normal PM samples.

[3750] FIG. 69 is a histogram showing over expression of the above-indicated TRIM31 tripartite motif transcripts in cancerous colon samples relative to the normal samples. The number and percentage of samples that exhibit at least 3 fold over-expression, out of the total number of samples tested is indicated in the bottom.

[3751] As is evident from FIG. 69, the expression of TRIM31 tripartite motif transcripts detectable by the above amplicon in cancer samples was higher than in the non-cancerous samples (Sample Nos. 41, 52, 62-67, 69-71, Table 1, “Tissue samples in testing samples”). Notably an over-expression of at least 3 fold was found in 6 out of 37 adenocarcinoma samples,

[3752] Statistical analysis was applied to verify the significance of these results, as described below.

[3753] The P value for the difference in the expression levels of TRIM31 tripartite motif transcripts detectable by the above amplicon in colon cancer samples versus the normal tissue samples was determined by T test as 6.58E-02.

[3754] Primer pairs are also optionally and preferably encompassed within the present invention; for example, for the above experiment, the following primer pair was used as a non-limiting illustrative example only of a suitable primer pair: HSHCGIseg20F forward primer (SEQ ID NO:1376); and HSHCGIseg20R reverse primer (SEQ ID NO:1377).

[3755] The present invention also preferably encompasses any amplicon obtained through the use of any suitable primer pair; for example, for the above experiment, the following amplicon was obtained as a non-limiting illustrative example only of a suitable amplicon: HSHCGIseg20 (SEQ ID NO:1378).

[3756] Expression of TRIM31 tripartite motif HSHCGI transcripts which are detectable by amplicon as depicted in sequence name HSHCGIseg35(SEQ ID NO:1381) in normal and cancerous colon tissues

[3757] Expression of TRIM31 tripartite motif transcripts detectable by or according to seg35, HSHCGIseg35 amplicon (SEQ ID NO:1381) and HSHCGIseg35F (SEQ ID NO:1379) HSHCGIseg35R (SEQ ID NO:1380) primers was measured by real time PCR. In parallel the expression of four housekeeping genes—PBGD (GenBank Accession No. BC019323 (SEQ ID NO:1576); amplicon—PBGD-amplicon, SEQ ID NO:531), HPRT1 (GenBank Accession No. NM_{—}000194 (SEQ ID NO:1577); amplicon—HPRT1-amplicon, SEQ ID NO:612), G6PD (GenBank Accession No. NM_{—}000402 (SEQ ID NO:1578); G6PD amplicon, SEQ ID NO:615), RPS27A (GenBank Accession No. NM_{—}002954 (SEQ ID NO:1579); RPS27A amplicon, SEQ ID NO:1261), was measured similarly. For each RT sample, the expression of the above amplicon was normalized to the geometric mean of the quantities of the housekeeping genes. The normalized quantity of each RT sample was then divided by the median of the quantities of the normal post-mortem (PM) samples (Sample Nos. 41, 52, 62-67, 69-71, Table 1, above, “Tissue samples in testing samples”), to obtain a value of fold up-regulation for each sample relative to median of the normal PM samples.

[3758] FIG. 70 is a histogram showing over expression of the above-indicated TRIM31 tripartite motif transcripts in cancerous colon samples relative to the normal samples. The number and percentage of samples that exhibit at least 3 fold over-expression, out of the total number of samples tested is indicated in the bottom.

[3759] As is evident from FIG. 70, the expression of TRIM31 tripartite motif transcripts detectable by the above amplicon in cancer samples was significantly higher than in the non-cancerous samples (Sample Nos. 41-45, 49-52, 62-67, 69-71 Table 1, “Tissue samples in testing samples”). Notably an over-expression of at least 3 fold was found in 8 out of 37 adenocarcinoma samples,

[3760] Statistical analysis was applied to verify the significance of these results, as described below.

[3761] The P value for the difference in the expression levels of TRIM31 tripartite motif transcripts detectable by the above amplicon in colon cancer samples versus the normal tissue samples was determined by T test as 7.56E-03.

[3762] Primer pairs are also optionally and preferably encompassed within the present invention; for example, for the above experiment, the following primer pair was used as a non-limiting illustrative example only of a suitable primer pair: HSHCGIseg35F forward primer (SEQ ID NO:1379); and HSHCGIseg35R reverse primer (SEQ ID NO:1380).

[3763] The present invention also preferably encompasses any amplicon obtained through the use of any suitable primer pair; for example, for the above experiment, the following amplicon was obtained as a non-limiting illustrative example only of a suitable amplicon: HSHCGIseg35 (SEQ ID NO:1381).

[3764] It should be noted that for R30650_PEA_{—}2-seg73, no differential expression was observed in one Q-PCR experiment carried out with colon panel. For HUMCEA_PEA_{—}1 seg 6—no differential expression was observed in one Q-PCR experiment carried out with colon panel.

[3765] It is appreciated that certain features of the invention, which are, for clarity, described in the context of separate embodiments, may also be provided in combination in a single embodiment. Conversely, various features of the invention, which are, for brevity, described in the context of a single embodiment, may also be provided separately or in any suitable subcombination.

[3766] Although the invention has been described in conjunction with specific embodiments thereof, it is evident that many alternatives, modifications and variations will be apparent to those skilled in the art. Accordingly, it is intended to embrace all such alternatives, modifications and variations that fall within the spirit and broad scope of the appended claims. All publications, patents and patent applications mentioned in this specification are herein incorporated in their entirety by reference into the specification, to the same extent as if each individual publication, patent or patent application was specifically and individually indicated to be incorporated herein by reference. In addition, citation or identification of any reference in this application shall not be construed as an admission that such reference is available as prior art to the present invention.

What is claimed is:

1. An isolated polynucleotide comprising a polynucleotide having a sequence of R11723_PEA_{—}1_T5 (SEQ ID NO 79).

2. The isolated polynucleotide of claim 1, comprising a node having a sequence of: R11723_PEA_{—}1_node_{—}13 (SEQ ID NO:450).

3. An isolated polypeptide comprising a polypeptide having a sequence of: R11723_PEA_{—}1_P13 (SEQ ID NO:606).

4. The isolated of claim 3, comprising a chimeric polypeptide encoding for R11723_PEA_{—}1_P13 (SEQ ID NO:606), comprising a first amino acid sequence being at least 95% homologous to MWVLGIAATFCGLFLLPGFALQIQCYQCEEFQLNNDCSSPEFIVNCTVNVQDMCQKEV MEQSA corresponding to amino acids 1-63 of Q96AC2, which also corresponds to amino acids 1-63 of R11723_PEA_{—}1_P13 (SEQ ID NO:606), and a second amino acid sequence being at least about 95% homologous to a polypeptide having the sequence DTKRTNTLLFEMRHFAKQLTT corresponding to amino acids 64-84 of R11723_PEA_{—}1_P13 (SEQ ID NO:606), wherein said first and second amino acid sequences are contiguous and in a sequential order.

4. The isolated polypeptide of claim 4, comprising a tail of R11723_PEA_{—}1_P13 (SEQ ID NO:606), comprising a polypeptide being at least about 95% homologous to the sequence DTKRTNTLLFEMRHFAKQLTT in R11723_PEA_{—}1_P13 (SEQ ID NO:606).

5. The isolated oligonucleotide of claim 1, comprising an amplicon according to SEQ ID NO:1297.

6. A primer pair, comprising a pair of isolated oligonucleotides capable of amplifying said amplicon of claim 5.

7. The primer pair of claim 6, comprising a pair of isolated oligonucleotides: SEQ NOs 1295 and 1296.

8. An antibody capable of specifically binding to an epitope of an amino acid sequence of claim 3.

9. The antibody of claim 8, wherein said amino acid sequence comprises said tail of claim 4.

10. The antibody of claim 8, wherein said antibody is capable of differentiating between a splice variant having said epitope and a corresponding known protein PSEC.

11. A kit for detecting colon cancer, comprising a kit detecting overexpression of a splice variant according to claim 1.

12. The kit of claim 11, wherein said kit comprises a NAT-based technology.

13. The kit of claim 11, wherein said kit further comprises at least one primer pair capable of selectively hybridizing to a nucleic acid sequence according to claim 1.

14. The kit of claim 11, wherein said kit further comprises at least one oligonucleotide capable of selectively hybridizing to a nucleic acid sequence according to claim 1.

12. A kit for detecting colon cancer, comprising a kit detecting overexpression of a splice variant according to claim 3, said kit comprising an antibody according to claim 8.

13. The kit of claim 12, wherein said kit further comprises at least one reagent for performing an ELISA or a Western blot.

14. A method for detecting colon cancer, comprising detecting overexpression of a splice variant according to claim 1.

15. The method of claim 14, wherein said detecting overexpression is performed with a NAT-based technology.

16. A method for detecting colon cancer, comprising detecting overexpression of a splice variant according to claim 3, wherein said detecting overexpression is performed with an immunoassay.

17. The method of claim 16, wherein said immunoassay comprises an antibody according to claim 8.

18. A biomarker capable of detecting colon cancer, comprising a nucleic acid sequence according to claim 1 or a fragment thereof, or an amino acid sequence according to claim 3 or a fragment thereof.

19. A method for screening for colon cancer, comprising detecting colon cancer cells with a biomarker according to claim 18.

20. A method for diagnosing colon cancer, comprising detecting colon cancer cells with a biomarker according to claim 18.

21. A method for monitoring disease progression and/or treatment efficacy and/or relapse of colon cancer, comprising detecting colon cancer cells with a biomarker according to claim 18.

22. A method of selecting a therapy for colon cancer, comprising detecting colon cancer cells with a biomarker according to claim 18 and selecting a therapy according to said detection.

The application's sequence listing, which the Patent Office published only in electronic form, follows.

SEQUENCE LISTING (1583 sequences)

SEQ ID NO: 1 - DNA, 2875 bp, Homo sapiens
tctgctggctgcgcggtggcggcggctgtgtgtgcgccgcgccttgccgccccccctggccccccgagcccggggcgcgcgctcccgcccgggccgtccgggccccgcggcgccgcggcccgaggccccgggaagcgcagccatggctctgcggaggctgggggccgcgctgctgctgctgccgctgctcgccgccgtggaagaaacgctaatggactccactacagcgactgctgagctgggctggatggtgcatcctccatcagggtgggaagaggtgagtggctacgatgagaacatgaacacgatccgcacgtaccaggtgtgcaacgtgtttgagtcaagccagaacaactggctacggaccaagtttatccggcgccgtggcgcccaccgcatccacgtggagatgaagttttcggtgcgtgactgcagcagcatccccagcgtgcctggctcctgcaaggagaccttcaacctctattactatgaggctgactttgactcggccaccaagaccttccccaactggatggagaatccatgggtgaaggtggataccattgcagccgacgagagcttctcccaggtggacctgggtggccgcgtcatgaaaatcaacaccgaggtgcggagcttcggacctgtgtcccgcagcggcttctacctggccttccaggactatggcggctgcatgtccctcatcgccgtgcgtgtcttctaccgcaagtgcccccgcatcatccagaatggcgccatcttccaggaaaccctgtcgggggctgagagcacatcgctggtggctgcccggggcagctgcatcgccaatgcggaagaggtggatgtacccatcaagctctactgtaacggggacggcgagtggctggtgcccatcgggcgctgcatgtgcaaagcaggcttcgaggccgttgagaatggcaccgtctgccgaggttgtccatctgggactttcaaggccaaccaaggggatgaggcctgtacccactgtcccatcaacagccggaccacttctgaaggggccaccaactgtgtctgccgcaatggctactacagagcagacctggaccccctggacatgccctgcacaaccatcccctccgcgccccaggctgtgatttccagtgtcaatgagacctccctcatgctggagtggacccctccccgcgactccggaggccgagaggacctcgtctacaacatcatctgcaagagctgtggctcgggccggggtgcctgcacccgctgcggggacaatgtacagtacgcaccacgccagctaggcctgaccgagccacgcatttacatcagtgacctgctggcccacacccagtacaccttcgagatccaggctgtgaacggcgttactgaccagagccccttctcgcctcagttcgcctctgtgaacatcaccaccaaccaggcagctccatcggcagtgtccatcatgcatcaggtgagccgcaccgtggacagcattaccctgtcgtggtcccagccagaccagcccaatggcgtgatcctggactatgagctgcagtactatgagaaggtacctattggctgggtgctgtccccatcacccacctccctgagggcccctctcccaggctgaggcctgggagttctgccccaccgcaagatgagacgcactggtgcagcagaaagagcactggccttggagtcaggctgcctggctcccaatccagctccgctccttcccactgtgagacctcaggcaggtgccttgacctctctggatctcacttttctggtctggaggatacacccagcaatctcagtgaaatgcaacagtcacatccctttccctaccacgaccctttcatcttgacctcagtggcttgatgttgggaaaaactgggtttccaaaaagctgcacttatgaagtgataattagtcactcacctcttcttcgacagagatttgaaacagctcaagagagcttccgcctgccctgctctgagtcctgctaaaacacccactttcactcgcctgcatgccctttgcatggggagaggtgatttcactttgagcttttaaatcagaccttaattactccctttgggtggaagcccctgggatggtagaaggatcactggactaagagtgagaagccgtaggttcaaatcccagctccgtccttcaccagctatgtgaccttgggcaggcgtctttctccctctgaacctcagtttccacctgtgtcgagtgtgggtgagacccctcgcggggagctatgcaggttacggagaaaaggcagcacagcacccagaatgggacctggccctcagcagaggccatgtgtgtccctggccttcctcctctgccctgcctgctgcacagtgggcaatggtgacaggatgggaggccaagtggatgtggggtctgcacagtacaggggccaggaggtagacagcacaattgcccacccacatggctggacatcagaggccccaggaagcctctcctttgaatgatcacttctcttacctgctccaggaggcaacaaacagccacagaggctgcaagggcacctgggaaaggcatcgcggggcttccattcagactaggtgtcaatgactgacagggaggcctttggttgagggcaagcccacggggaactgcagatggatggaagggctctccctgaaggctgagaggaagagtgcagtcaattgcagccagtcctgctggagcccaactttctagagcccagcccggccttcccactctgttaactgctggatcggctaaccaggccggtctccagggcctttcaaacacttacccagcctttgccggccgtcttaccattgcttgcgtgcgtgttcatccc

SEQ ID NO: 2 - DNA, 1182 bp, Homo sapiens
tctgctggctgcgcggtggcggcggctgtgtgtgcgccgcgccttgccgccccccctggccccccgagcccggggcgcgcgctcccgcccgggccgtccgggccccgcggcgccgcggcccgaggccccgggaagcgcagccatggctctgcggaggctgggggccgcgctgctgctgctgccgctgctcgccgccgtggaagaaacgctaatggactccactacagcgactgctgagctgggctggatggtgcatcctccatcagggtgggaagaggtgagtggctacgatgagaacatgaacacgatccgcacgtaccaggtgtgcaacgtgtttgagtcaagccagaacaactggctacggaccaagtttatccggcgccgtggcgcccaccgcatccacgtggagatgaagttttcggtgcgtgactgcagcagcatccccagcgtgcctggctcctgcaaggagaccttcaacctctattactatgaggctgactttgactcggccaccaagaccttccccaactggatggagaatccatgggtgaaggtggataccattgcagccgacgagagcttctcccaggtggacctgggtggccgcgtcatgaaaatcaacaccgaggtgcggagcttcggacctgtgtcccgcagcggcttctacctggccttccaggactatggcggctgcatgtccctcatcgccgtgcgtgtcttctaccgcaagtgcccccgcatcatccagaatggcgccatcttccaggaaaccctgtcgggggctgagagcacatcgctggtggctgcccggggcagctgcatcgccaatgcggaagaggtggatgtacccatcaagctctactgtaacggggacggcgagtggctggtgcccatcgggcgctgcatgtgcaaagcaggcttcgaggccgttgagaatggcaccgtctgccgagagagacaggatctcactatgttgtccaggctggtcttgaactcgtggccacaaatgatcctcccacctcagcctcccaaagtgttggaattataggcatgaaccaccatgcccaggaggagaatttttgataataatattttgtggacatctttgcatatcatgtcagagctataacatcattgtggagaagctcttaggatcccatagaataaatgtaccgtaattta

SEQ ID NO: 3 - DNA, 2518 bp, Homo sapiens
tgaccctgggaaatgcttctatccctgagaggaggctcagcacagaaggaggaaggacagcagggccaacagtcacagcagccctgaccagagcattcctggagctcaagctcctctacaaagaggtggacagagaagacagcagagaccatgggacccccctcagcccctccctgcagattgcatgtcccctggaaggaggtcctgctcacagcctcacttctaaccttctggaacccacccaccactgccaagctcactattgaatccacgccgttcaatgtcgcagaggggaaggaggttcttctactcgcccacaacctgccccagaatcgtattggttacagctggtacaaaggcgaaagagtggatggcaacagtctaattgtaggatatgtaataggaactcaacaagctaccccagggcccgcatacagtggtcgagagacaatataccccaatgcatccctgctgatccagaacgtcacccagaatgacacaggattctataccctacaagtcataaagtcagatcttgtgaatgaagaagcaaccggacagttccatgtatacccggagctgcccaagccctccatctccagcaacaactccaaccccgtggaggacaaggatgctgtggccttcacctgtgaacctgaggttcagaacacaacctacctgtggtgggtaaatggtcagagcctcccggtcagtcccaggctgcagctgtccaatggcaacatgaccctcactctactcagcgtcaaaaggaacgatgcaggatcctatgaatgtgaaatacagaacccagcgagtgccaaccgcagtgacccagtcaccctgaatgtcctctatggcccagatgtccccaccatttccccctcaaaggccaattaccgtccaggggaaaatctgaacctctcctgccacgcagcctctaacccacctgcacagtactcttggtttatcaatgggacgttccagcaatccacacaagagctctttatccccaacatcactgtgaataatagcggatcctatatgtgccaagcccataactcagccactggcctcaataggaccacagtcacgatgatcacagtctctgattggaccagaccctgaattcttctagctcctccaatcccattttatcccatggaaccactaaaaacaaggtctgctctgctcctgaagccctatatgctggagatggacaactcaatgaaaatttaaagggaaaaccctcaggcctgaggtgtgtgccactcagagacttcacctaactagagacaggcaaactgcaaaccatggtgagaaattgacgacttcacactatggacagcttttcccaagatgtcaaaacaagactcctcatcatgataaggctcttacccccttttaatttgtccttgcttatgcctgcctctttcgcttggcaggatgatgctgtcattagtatttcacaagaagtagcttcagagggtaacttaacagagtatcagatctatcttgtcaatcccaacgttttacataaaataagagatcctttagtgcacccagtgactgacattagcagcatctttaacacagccgtgtgttcaaatgtacagtggtccttttcagagttggacttctagactcacctgttctcactccctgttttaattcaacccagccatgcaatgccaaataatagaattgctccctaccagctgaacagggaggagtctgtgcagtttctgacacttgttgttgaacatggctaaatacaatgggtatcgctgagactaagttgtagaaattaacaaatgtgctgcttggttaaaatggctacactcatctgactcattctttattctattttagttggtttgtatcttgcctaaggtgcgtagtccaactcttggtattaccctcctaatagtcatactagtagtcatactccctggtgtagtgtattctctaaaagctttaaatgtctgcatgcagccagccatcaaatagtgaatggtctctctttggctggaattacaaaactcagagaaatgtgtcatcaggagaacatcataacccatgaaggataaaagccccaaatggtggtaactgataatagcactaatgctttaagatttggtcacactctcacctaggtgagcgcattgagccagtggtgctaaatgctacatactccaactgaaatgttaaggaagaagatagatccaattaaaaaaaattaaaaccaatttaaaaaaaaaaagaacacaggagattccagtctacttgagttagcataatacagaagtcccctctactttaacttttacaaaaaagtaacctgaactaatctgatgttaaccaatgtatttatttctgtggttctgtttccttgttccaatttgacaaaacccactgttcttgtattgtattgcccagggggagctatcactgtacttgtagagtggtgctgctttaattcataaatcacaaataaaagccaattagctctataactaaa

SEQ ID NO: 4 - DNA, 2376 bp, Homo sapiens
tgaccctgggaaatgcttctatccctgagaggaggctcagcacagaaggaggaaggacagcagggccaacagtcacagcagccctgaccagagcattcctggagctcaagctcctctacaaagaggtggacagagaagacagcagagaccatgggacccccctcagcccctccctgcagattgcatgtcccctggaaggaggtcctgctcacagcctcacttctaaccttctggaacccacccaccactgccaagctcactattgaatccacgccgttcaatgtcgcagaggggaaggaggttcttctactcgcccacaacctgccccagaatcgtattggttacagctggtacaaaggcgaaagagtggatggcaacagtctaattgtaggatatgtaataggaactcaacaagctaccccagggcccgcatacagtggtcgagagacaatataccccaatgcatccctgctgatccagaacgtcacccagaatgacacaggattctataccctacaagtcataaagtcagatcttgtgaatgaagaagcaaccggacagttccatgtatacccggagctgcccaagccctccatctccagcaacaactccaaccccgtggaggacaaggatgctgtggccttcacctgtgaacctgaggttcagaacacaacctacctgtggtgggtaaatggtcagagcctcccggtcagtcccaggctgcagctgtccaatggcaacatgaccctcactctactcagcgtcaaaaggaacgatgcaggatcctatgaatgtgaaatacagaacccagcgagtgccaaccgcagtgacccagtcaccctgaatgtcctcttgctcctgtcctctcagctgtggccaccgtcggcatcacgattggagtgctggccagggtggctctgatatagcagccctggtgtattttcgatatttcaggaagactggcagattggaccagaccctgaattcttctagctcctccaatcccattttatcccatggaaccactaaaaacaaggtctgctctgctcctgaagccctatatgctggagatggacaactcaatgaaaatttaaagggaaaaccctcaggcctgaggtgtgtgccactcagagacttcacctaactagagacaggcaaactgcaaaccatggtgagaaattgacgacttcacactatggacagcttttcccaagatgtcaaaacaagactcctcatcatgataaggctcttacccccttttaatttgtccttgcttatgcctgcctctttcgcttggcaggatgatgctgtcattagtatttcacaagaagtagcttcagagggtaacttaacagagtatcagatctatcttgtcaatcccaacgttttacataaaataagagatcctttagtgcacccagtgactgacattagcagcatctttaacacagccgtgtgttcaaatgtacagtggtccttttcagagttggacttctagactcacctgttctcactccctgttttaattcaacccagccatgcaatgccaaataatagaattgctccctaccagctgaacagggaggagtctgtgcagtttctgacacttgttgttgaacatggctaaatacaatgggtatcgctgagactaagttgtagaaattaacaaatgtgctgcttggttaaaatggctacactcatctgactcattctttattctattttagttggtttgtatcttgcctaaggtgcgtagtccaactcttggtattaccctcctaatagtcatactagtagtcatactccctggtgtagtgtattctctaaaagctttaaatgtctgcatgcagccagccatcaaatagtgaatggtctctctttggctggaattacaaaactcagagaaatgtgtcatcaggagaacatcataacccatgaaggataaaagccccaaatggtggtaactgataatagcactaatgctttaagatttggtcacactctcacctaggtgagcgcattgagccagtggtgctaaatgctacatactccaactgaaatgttaaggaagaagatagatccaattaaaaaaaattaaaaccaatttaaaaaaaaaaagaacacaggagattccagtctacttgagttagcataatacagaagtcccctctactttaacttttacaaaaaagtaacctgaactaatctgatgttaaccaatgtatttatttctgtggttctgtttccttgttccaatttgacaaaacccactgttcttgtattgtattgcccagggggagctatcactgtacttgtagagtggtgctgctttaattcataaatcacaaataaaagccaattagctctataactaaa

SEQ ID NO: 5 - DNA, 3004 bp, Homo sapiens
tgaccctgggaaatgcttctatccctgagaggaggctcagcacagaaggaggaaggacagcagggccaacagtcacagcagccctgaccagagcattcctggagctcaagctcctctacaaagaggtggacagagaagacagcagagaccatgggacccccctcagcccctccctgcagattgcatgtcccctggaaggaggtcctgctcacagcctcacttctaaccttctggaacccacccaccactgccaagctcactattgaatccacgccgttcaatgtcgcagaggggaaggaggttcttctactcgcccacaacctgccccagaatcgtattggttacagctggtacaaaggcgaaagagtggatggcaacagtctaattgtaggatatgtaataggaactcaacaagctaccccagggcccgcatacagtggtcgagagacaatataccccaatgcatccctgctgatccagaacgtcacccagaatgacacaggattctataccctacaagtcataaagtcagatcttgtgaatgaagaagcaaccggacagttccatgtatacccggagctgcccaagccctccatctccagcaacaactccaaccccgtggaggacaaggatgctgtggccttcacctgtgaacctgaggttcagaacacaacctacctgtggtgggtaaatggtcagagcctcccggtcagtcccaggctgcagctgtccaatggcaacatgaccctcactctactcagcgtcaaaaggaacgatgcaggatcctatgaatgtgaaatacagaacccagcgagtgccaaccgcagtgacccagtcaccctgaatgtcctctatggcccagatgtccccaccatttccccctcaaaggccaattaccgtccaggggaaaatctgaacctctcctgccacgcagcctctaacccacctgcacagtactcttggtttatcaatgggacgttccagcaatccacacaagagctctttatccccaacatcactgtgaataatagcggatcctatatgtgccaagcccataactcagccactggcctcaataggaccacagtcacgatgatcacagtctctggtaagtggatccatgaagcactagcatcacattttcaggtggagtctggctctcagagaagagccaggaagaaattttctttcccaacctgtgtccaaggggcacacgcaaatcccaaattctcccctgaaccctcccaattcacctctgcagactcttttccccttgtttttttgttttttgttgttttttgttttttgatttctcatgtctgactttgggtccatcctggaatgagaggagggggctccctcagcactgagccctgtgtagtgaaaggggcttcacagagaaaaaaggaggaagggtcctcagggtcaagttcctgctctctgtcaccaacaattccctttctgtcacttctttgtgttcttttacctactccataagctacaagggacaaggaggttttgaaatgagctcacactttttccttaaatgagaagaggaagccccttgggtgatggaggagcagctcagactctgcccccatctctgctcccagcacccccagtgactgactgaccccaccctgaagccacctaaggtggaaccagggcatatggagaaggtgcccaggtgtctgtcctgaatcaggctaaatcaagatgctaatcaacaccaaagcctcccctggatcaggccgcaggaaaatgggaagacatggagcctcatgacagactgctgagctgtgtcctggctctgaagtcactggctgtataagactgtgggcacagcacatgggacacagcacagaggacagcaagtgacgcacacttggagacatagggagattcagccatggggactctgcatggcagggaaggggcagtgccaaaaagtgtgtatttatagagaggataagactaccagccactatgtatctaatataggacttaccttttcaacccttccacgtgtgcaggtccgtagtattaaacacattcccgttgttctgctaccatcaccaccacccacccacagaactctcttcttcctcccaaaatgaaactctgttcccatcaaactcctgggcagagctgcccacctgtgacccacagcctgacccctgaactcacctctagacttgcttctggtctcccgctcaaacccccatccccatcatcacccatctccaggatgtccttaaatagcaaagcctcagaaaaaacacaccttggctgggtggtgtgggactgtgcagctgaaagaaacagcacctgcatgttccaggtgagtaccccaaaagaccaggcagtcagccagtcagggaagaaacaggagaggtgccagaggctgtggctgtcagtcctgtatctgcccaagactcaatgcttctgccctattcacatttgagaaagtctgtacttctcccacacaaagcaggtggcctcgatctccgagccctcagatcgttgtgcatccgtcttctgacacacacacctgccctgggctcttaaggacttgggtggactgaggggtgggagatgccaactctgactgaacgatgcctgcagaggaatcaaaggtgccacacacggcaatcttctctctgttttctgcacagcggagctgcccaagccctcggtcaccagcaacaactccaaccctgtagagttttctacatataagtttaagttatctgtgaacagagataattttacttctttccgatttggatgtctgtttatttgtttgtttgctgcctaatttctccagctaggacttaaaatactatgttgaagagaagtggggcaagcaggcatccttgtcttgctcctggtcttacagggaaagctttcagtctttctccattgagtatccctctattatgttgaggtggtttccttccattcacagagtgtttttatttataaaagaatgttgaattttgtc

SEQ ID NO: 6 - DNA, 1410 bp, Homo sapiens
tgaccctgggaaatgcttctatccctgagaggaggctcagcacagaaggaggaaggacagcagggccaacagtcacagcagccctgaccagagcattcctggagctcaagctcctctacaaagaggtggacagagaagacagcagagaccatgggacccccctcagcccctccctgcagattgcatgtcccctggaaggaggtcctgctcacagcctcacttctaaccttctggaacccacccaccactgccaagctcactattgaatccacgccgttcaatgtcgcagaggggaaggaggttcttctactcgcccacaacctgccccagaatcgtattggttacagctggtacaaaggcgaaagagtggatggcaacagtctaattgtaggatatgtaataggaactcaacaagctaccccagggcccgcatacagtggtcgagagacaatataccccaatgcatccctgctgatccagaacgtcacccagaatgacacaggattctataccctacaagtcataaagtcagatcttgtgaatgaagaagcaaccggacagttccatgtataccgtgagtatttccacatgacctctgggtgttgggggtcagttctacttcccacatacgggattgtcaggcctgggttgtgcctgtggccctctctgcattacatcctgtatcagggtttggacatttagtgcaggacacacacgggggagacaaacttccacagatcagaattcctttcctggatccagaccctgcagacactcgctgcagaggaaggacagtctgatggggggactcagcagggcgaggtcagtgtcagacaagcaccccatggtctccccatggacctgaccctgagaaagaccctggagaactggatcagggcctggcctgaggggtccccctagggacccctcagagagaagctcaactcttccctgaactgagcccctgtacaaagccctgtccctggttcctgattccaggtgatcctggggagtctgtgccagggctgtgtggtggcctcttgggcagggctggctgggagcaaggatgtgagctatccaagggccatgactcctggagttggtcaccagccaggtccgagcacccagagcctcatctagctgaggatagggcctcctccttcacttgaggctcagcatggaaaggacagatggaaaaaattactagtgcatgagcccactgccctgggggacacaggttactccctgggaagttcagagtccccaaggggaggaacagagaagagaggatgctcctggcagctccatgtccaccagggatcaggcccagggccctctgtcttggaagcaaataatcatagataactgttcacttgggcagctcctctgtgcagagctgagatcaagtaa

SEQ ID NO: 7 - DNA, 1745 bp, Homo sapiens
ttatgctcccgcggaggccaagcggactccctgacaggacagaatctgaacgtgagagtgaaggtcttgcctgtccagaaactcttgtagccagcacaggtttaaacaagaagccaaattgttctggagagattgctgggggctttctttgtgcctcaagcttcttcagtgccctgagcacaggaaacactcaagcagagaagcagagccaaacccaggatacgggaggtcgaggctcttccgtagacctgcagcattggggtgggatgatgttcattctgtgtgtgttctggaccaagcccctctccagggacctatgggcagccccctttaagcaagatgcccggtggagtgggcatccaccatcacttaccctgggcttgggtgaatagattttccgtgccttaaatgggcagggagggggtaaacatggacggtccattggtacaaataaaagcctttggtgggttttgatcaattgcaaggatcgaaggagacctgtggacctgaggtcaactggcagcagagaagagtctgggttcgtgaaggcgccgccgcggtgccgcgccacgtatttgcataaaaaaggccaagaaaactctggctgtgccccagcaacggctcattctgctcccccgggtcggagccccccggagctgcgcgcgggcttgcagcgcctcgcccgcgctgtcctcccggtgtcccgcttctccgcgccccagccgccggctgccagcttttcggggccccgagtcgcacccagcgaagagagcgggcccgggacaagctcgaactccggccgcctcgcccttccccggctccgctccctctgccccctcggggtcgcgcgcccacgatgctgcagggccctggctcgctgctgctgctcttcctcgcctcgcactgctgcctgggctcggcgcgcgggctcttcctctttggccagcccgacttctcctacaagcgcagcaattgcaagcccatcccggccaacctgcagctgtgccacggcatcgaataccagaacatgcggctgcccaacctgctgggccacgagaccatgaaggaggtgctggagcaggccggcgcttggatcccgctggtcatgaagcagtgccacccggacaccaagaagttcctgtgctcgctcttcgcccccgtctgcctcgatgacctagacgagaccatccagccatgccactcgctctgcgtgcaggtgaaggaccgctgcgccccggtcatgtccgccttcggcttcccctggcccgacatgcttgagtgcgaccgtttcccccaggacaacgacctttgcatccccctcgctagcagcgaccacctcctgccagccaccgaggaaggtaagccttccctcttgcttccccactccctgctgggctgagacgctcccaggagatcccgcccctgccacgcatcccagtgcatccctgcttggggtgccagtagcgggaagggcagaagttctgcctgacctggtctgtcatcacaacaagcctgtatcaaatttgaggcacccctcccacgccgcccaagtctcgcgcattctcctcccgagttgtaccagctatacttaagggcagtttaaaaataaaacaaacaaacaaaaacaacaaaactaaaaaaacgaagaactgaacggcggtttaaaaaaaaatagatacacgattattgttaaagatgctagcactggagctgcgcagagcgttggaagtggtgtttggtggagg

SEQ ID NO: 8 - DNA, 3322 bp, Homo sapiens
gtccggacaggccgagatgacgccgagccccctgttgctgctcctgctgccgccgctgctgctgggggccttcccgccggccgccgccgcccgaggccccccaaagatggcggacaaggtggtcccacggcaggtggcccggctgggccgcactgtgcggctgcagtgcccagtggagggggacccgccgccgctgaccatgtggaccaaggatggccgcaccatccacagcggctggagccgcttccgcgtgctgccgcaggggctgaaggtgaagcaggtggagcgggaggatgccggcgtgtacgtgtgcaaggccaccaacggcttcggcagcctgagcgtcaactacaccctcgtcgtgctggatgacattagcccagggaaggagagcctggggcccgacagctcctctgggggtcaagaggaccccgccagccagcagtgggcacgaccgcgcttcacacagccctccaagatgaggcgccgggtgatcgcacggcccgtgggtagctccgtgcggctcaagtgcgtggccagcgggcaccctcggcccgacatcacgtggatgaaggacgaccaggccttgacgcgcccagaggccgctgagcccaggaagaagaagtggacactgagcctgaagaacctgcggccggaggacagcggcaaatacacctgccgcgtgtcgaaccgcgcgggcgccatcaacgccacctacaaggtggatgtgatccagcggacccgttccaagcccgtgctcacaggcacgcaccccgtgaacacgacggtggacttcggggggaccacgtccttccagtgcaaggtgcgcagcgacgtgaagccggtgatccagtggctgaagcgcgtggagtacggcgccgagggccgccacaactccaccatcgatgtgggcggccagaagtttgtggtgctgcccacgggtgacgtgtggtcgcggcccgacggctcctacctcaataagctgctcatcacccgtgcccgccaggacgatgcgggcatgtacatctgccttggcgccaacaccatgggctacagcttccgcagcgccttcctcaccgtgctgccaggtgcgcggctgccacgccacgccacaccatgctggtgcccggacccgccccctgggcccggcgtcccacccaccgggtggggccccacccttccctcccgggccgtgctggccaggtcatctgccgagggagggcagcccaggggcaccgtctccacagcccctgggatgggtctggggtgctctcctggtctttgtgtcggcgttcccctccctacctcctttcctctcgctcttgcagacccaaaaccgccagggccacctgtggcctcctcgtcctcggccactagcctgccgtggcccgtggtcatcggcatcccagccggcgctgtcttcatcctgggcaccctgctcctgtggctttgccaggcccagaagaagccgtgcacccccgcgcctgcccctcccctgcctgggcaccgcccgccggggacggcccgcgaccgcagcggagacaaggaccttccctcgttggccgccctcagcgctggccctggtgtggggctgtgtgaggagcatgggtctccggcagccccccagcacttactgggcccaggcccagttgctggccctaagttgtaccccaaactctacacagacatccacacacacacacacacacactctcacacacactcacacgtggagggcaaggtccaccagcacatccactatcagtgctagacggcaccgtatctgcagtgggcacgggggggccggccagacaggcagactgggaggatggaggacggagctgcagacgaaggcaggggacccatggcgaggaggaatggccagcaccccaggcagtctgtgtgtgaggcatagcccctggacacacacacacagacacacacactacctggatgcatgtatgcacacacatgcgcgcacacgtgctccctgaaggcacacgtacgcacacacgcacatgcacagatatgccgcctgggcacacagataagctgcccaaatgcacgcacacgcacagagacatgccagaacatacaaggacatgctgcctgaacatacacacgcacacccatgcgcagatgtgctgcctggacacacacacacacacggatatgctgtctggacgcacacacgtgcagatatggtatccggacacacacgtgcacagatatgctgcctggacacacagataatgctgccttgacacacacatgcacggatattgcctggacacacacacacacacgcgtgcacagatatgctgtctggacacgcacacacatgcagatatgctgcctggacacacacttccagacacacgtgcacaggcgcagatatgctgcctggacacacgcagatatgctgtctagtcacacacacacgcagacatgctgtccggacacacacacgcatgcacagatatgctgtccggacacacacacgcacgcagatatgctgcctggacacacacacagataatgctgcctcaacactcacacacgtgcagatattgcctggacacacacatgtgcacagatatgctgtctggacatgcacacacgtgcagatatgctgtccggatacacacgcacgcacacatgcagatatgctgcctgggcacacacttccggacacacatgcacacacaggtgcagatatgctgcctggacacacgcagactgacgtgcttttgggagggtgtgccgtgaagcctgcagtacgtgtgccgtgaggctcatagttgatgagggactttccctgctccaccgtcactcccccaactctgcccgcctctgtccccgcctcagtccccgcctccatccccgcctctgtcccctggccttggcggctatttttgccacctgccttgggtgcccaggagtcccctactgctgtgggctggggttgggggcacagcagccccaagcctgagaggctggagcccatggctagtggctcatccccactgcattctccccctgacacagagaaggggccttggtatttatatttaagaaatgaagataatattaataatgatggaaggaagactgggttgcagggactgtggtctctcctggggcccgggacccgcctggtctttcagccatgctgatgaccacaccccgtccaggccagacaccaccccccaccccactgtcgtggtggccccagatctctgtaattttatgtagagtttgagctgaagccccgtatatttaatttattttgttaaacatgaaagtgcatcctttccctcca

SEQ ID NO: 9 - DNA, 2817 bp, Homo sapiens
gtccggacaggccgagatgacgccgagccccctgttgctgctcctgctgccgccgctgctgctgggggccttcccgccggccgccgccgcccgaggccccccaaagatggcggacaaggtggtcccacggcaggtggcccggctgggccgcactgtgcggctgcagtgcccagtggagggggacccgccgccgctgaccatgtggaccaaggatggccgcaccatccacagcggctggagccgcttccgcgtgctgccgcaggggctgaaggtgaagcaggtggagcgggaggatgccggcgtgtacgtgtgcaaggccaccaacggcttcggcagcctgagcgtcaactacaccctcgtcgtgctggatgacattagcccagggaaggagagcctggggcccgacagctcctctgggggtcaagaggaccccgccagccagcagtgggcacgaccgcgcttcacacagccctccaagatgaggcgccgggtgatcgcacggcccgtgggtagctccgtgcggctcaagtgcgtggccagcgggcaccctcggcccgacatcacgtggatgaaggacgaccaggccttgacgcgcccagaggccgctgagcccaggaagaagaagtggacactgagcctgaagaacctgcggccggaggacagcggcaaatacacctgccgcgtgtcgaaccgcgcgggcgccatcaacgccacctacaaggtggatgtgatccagcggacccgttccaagcccgtgctcacaggcacgcaccccgtgaacacgacggtggacttcggggggaccacgtccttccagtgcaagacccaaaaccgccagggccacctgtggcctcctcgtcctcggccactagcctgccgtggcccgtggtcatcggcatcccagccggcgctgtcttcatcctgggcaccctgctcctgtggctttgccaggcccagaagaagccgtgcacccccgcgcctgcccctcccctgcctgggcaccgcccgccggggacggcccgcgaccgcagcggagacaaggaccttccctcgttggccgccctcagcgctggccctggtgtggggctgtgtgaggagcatgggtctccggcagccccccagcacttactgggcccaggcccagttgctggccctaagttgtaccccaaactctacacagacatccacacacacacacacacacactctcacacacactcacacgtggagggcaaggtccaccagcacatccactatcagtgctagacggcaccgtatctgcagtgggcacgggggggccggccagacaggcagactgggaggatggaggacggagctgcagacgaaggcaggggacccatggcgaggaggaatggccagcaccccaggcagtctgtgtgtgaggcatagcccctggacacacacacacagacacacacactacctggatgcatgtatgcacacacatgcgcgcacacgtgctccctgaaggcacacgtacgcacacacgcacatgcacagatatgccgcctgggcacacagataagctgcccaaatgcacgcacacgcacagagacatgccagaacatacaaggacatgctgcctgaacatacacacgcacacccatgcgcagatgtgctgcctggacacacacacacacacggatatgctgtctggacgcacacacgtgcagatatggtatccggacacacacgtgcacagatatgctgcctggacacacagataatgctgccttgacacacacatgcacggatattgcctggacacacacacacacacgcgtgcacagatatgctgtctggacacgcacacacatgcagatatgctgcctggacacacacttccagacacacgtgcacaggcgcagatatgctgcctggacacacgcagatatgctgtctagtcacacacacacgcagacatgctgtccggacacacacacgcatgcacagatatgctgtccggacacacacacgcacgcagatatgctgcctggacacacacacagataatgctgcctcaacactcacacacgtgcagatattgcctggacacacacatgtgcacagatatgctgtctggacatgcacacacgtgcagatatgctgtccggatacacacgcacgcacacatgcagatatgctgcctgggcacacacttccggacacacatgcacacacaggtgcagatatgctgcctggacacacgcagactgacgtgcttttgggagggtgtgccgtgaagcctgcagtacgtgtgccgtgaggctcatagttgatgagggactttccctgctccaccgtcactcccccaactctgcccgcctctgtccccgcctcagtccccgcctccatccccgcctctgtcccctggccttggcggctatttttgccacctgccttgggtgcccaggagtcccctactgctgtgggctggggttgggggcacagcagccccaagcctgagaggctggagcccatggctagtggctcatccccactgcattctccccctgacacagagaaggggccttggtatttatatttaagaaatgaagataatattaataatgatggaaggaagactgggttgcagggactgtggtctctcctggggcccgggacccgcctggtctttcagccatgctgatgaccacaccccgtccaggccagacaccaccccccaccccactgtcgtggtggccccagatctctgtaattttatgtagagtttgagctgaagccccgtatatttaatttattttgttaaacatgaaagtgcatcctttccctcca

SEQ ID NO: 10 - DNA, 2546 bp, Homo sapiens
agtggggagagatgagtgtagataaaaggagtgcagaaggcacgaggaagccacagtgctccggatcctccaatcttcgctcctccaatctccgctcctccacccagttcaggaacccgcgaccgctcgcagcgctctcttgaccactatgagcctcctgtccagccgcgcggcccgtgtccccggtccttcgagctccttgtgcgcgctgttggtgctgctgctgctgctgacgcagccagggcccatcgccagcgctggtcctgccgctgctgtgttgagagagctgcgttgcgtttgtttacagaccacgcagggagttcatcccaaaatgatcagtaatctgcaagtgttcgccataggcccacagtgctccaaggtggaagtggtgtaagttctgtgctgctgtgtccgctgtgaccttggcaagagagaaatcccgcagcctgggtcttcaaccttggtatctcatgagtgtatcttctttttctttccttcagagcctccctgaagaacgggaaggaaatttgtcttgatccagaagccccttttctaaagaaagtcatccagaaaattttggacggtggaaacaaggaaaactgattaagagaaatgagcacgcatggaaaagtttcccagtcttcagcagagaagttttctggaggtctctgaacccagggaagacaagaaggaaagattttgttgttgtttgtttatttgtttttccagtagttagctttcttcctggattcctcactttgaagagtgtgaggaaaacctatgtttgccgcttaagctttcagctcagctaatgaagtgtttagcatagtacctctgctatttgctgttattttatctgctatgctattgaagttttggcaattgactatagtgtgagccaggaatcactggctgttaatctttcaaagtgtcttgaattgtaggtgactattatatttccaagaaatattccttaagatattaactgagaaggctgtggatttaatgtggaaatgatgtttcataagaattctgttgatggaaatacactgttatcttcacttttataagaaataggaaatattttaatgtttcttggggaatatgttagagaatttccttactcttgattgtgggatactatttaattatttcactttagaaagctgagtgtttcacaccttatctatgtagaatatatttccttattcagaatttctaaaagtttaagttctatgagggctaatatcttatcttcctataattttagacattctttatctttttagtatggcaaactgccatcatttacttttaaactttgattttatatgctatttattaagtattttattaggagtaccataattctggtagctaaatatatattttagatagatgaagaagctagaaaacaggcaaattcctgactgctagtttatatagaaatgtattcttttagtttttaaagtaaaggcaaacttaacaatgacttgtactctgaaagttttggaaacgtattcaaacaatttgaatataaatttatcatttagttataaaaatatatagcgacatcctcgaggccctagcatttctccttggataggggaccagagagagcttggaatgttaaaaacaaaacaaaacaaaaaaaaacaaggagaagttgtccaagggatgtcaattttttatccctctgtatgggttagattttccaaaatcataatttgaagaaggccagcatttatggtagaatatataattatatataaggtggccacgctggggcaagttccctccccactcacagctttggcccctttcacagagtagaacctgggttagaggattgcagaagacgagcggcagcggggagggcagggaagatgcctgtcgggtttttagcacagttcatttcactgggattttgaagcatttctgtctgaatgtaaagcctgttctagtcctggtgggacacactggggttgggggtgggggaagatgcggtaatgaaaccggttagtcagtgttgtcttaatatccttgataatgctgtaaagtttatttttacaaatatttctgtttaagctatttcacctttgtttggaaatccttcccttttaaagagaaaatgtgacacttgtgaaaaggcttgtaggaaagctcctccctttttttctttaaacctttaaatgacaaacctaggtaattaatggttgtgaatttctatttttgctttgtttttaatgaacatttgtctttcagaataggattctgtgataatatttaaatggcaaaaacaaaacataattttgtgcaattaacaaagctactgcaagaaaaataaaacatttcttggtaaaaacgtatgtatttatatattatatatttatatataatatatattatatatttagcattgctgagctttttagatgcctattgtgtatcttttaaaggttttgaccattttgttatgagtaattacatatatattacattcactatattaaaattgtacttttttactatgtgtctcattggtt

SEQ ID NO: 11 - DNA, 2131 bp, Homo sapiens
tcgccttccttcgggactccggatcgatctggagctccgggaatttccctggcccggccgctccgggctttccagtctcaaccatgcataaaaagggttcgccgatcttggggagccacacagcccgggtcgcaggcacctccccgccagctctcccgcttctcgcacagcttcccgacgcgtctgctgagccccatggcccacgccacgctctccgccgcccccagcaatccccggctcctgcgggtggcgctgctgctcctgctcctggtggccgccagccggcgcgcagcaggagcgtccgtggtcactgaactgcgctgccagtgcttgcagacactgcagggaattcacctcaagaacatccaaagtgtgaatgtaaggtcccccggaccccactgcgcccaaaccgaagtcatgtaagtcccgccccgcgcttccgctgccaccgctggggtccccgactctcccgctgccccaaccctgtccccagcccgacctcctgtctcacggaattcccttctctctgcagagccacactcaagaatgggaagaaagcttgtctcaaccccgcatcccccatggttcagaaaatcatcgaaaagatactgaacaagtgagttgtaatttccatatacacaggcgactggagccgttggtcagaaatactggcatctgccccctaaaaataaaatcagggaaccccaagagttagctgaaggactagaaattgtgattattattttcacaattaaagttgccattaaggttattaatctgctctggtgccagaggatatttcagtatttcagtgtcttccatttccaggcctaacccctgggagggtaaatgtgggtttctagaatactaagtaaatttgactaacaatgccaaaatgccccctgcctgttttgggacgtttacctcagtccctaatgggcttcagacctgaaaaatgcaatgtctggtttgggcactttgggcctgtaagccttcttggtgaagagcagaaactttgcagtaacaccttcagtgagttcaaggctaggatccctgtcaacattatttaatctctttgagctttagcaaaatagggtagataatggtagttatttcatagggttgtgtgcagcttaagggagatcatgaatggacatttctaacccaatgtgacaatcagtgaccaatatgttttggctttttcaaaccaagaatctagttgagtccacagccacttctttcttgaaaaaaaaaaaaaaaaagcattcaggagtgcaagttttctgctatagaaggcagtgggtacagacagaccttccctgagtggagggctgggagagagtctgcatggggacatccctccaagcaacttcagagtgacagaagagcagccttccttagcacctgcaacagtaacccttttctcatcacagggggagcaccaactgacaggagagaagtaagaagcttatcagcgtatcattgacacttcctgcagggtggtccctgcccttaccagagctgaaaatgaaaaagagaacagcagctttctagggacagctggaaaggacttaatgtgtttgactatttcttacgagggttctacttatttatgtatttatttttgaaagcttgtattttaatattttacatgctgttatttaaagatgtgagtgtgtttcatcaaacatagctcagtcctgattatttaattggaatatgatgggttttaaatgtgtcattaaactaatatttagtgggagaccataatgtgtcagccaccttgataaatgacagggtggggaactggagggtggggggattgaaatgcaagcaattagtggatcactgttagggtaagggaatgtatgtacacatctattttttatactttttttttaaaaaaagaatgtcagttgttatttattcaaattatctcacattatgtgttcaacatttttatgctgaagtttcccttagacattttatgtcttgcttgtagggcataatgccttgtttaatgtccattctgcagcgtttctctttcccttggaaaagagaatttatcattactgttacatttgtacaaatgacatgataataaaagttttatgaaaaaaaaggcttatgt

SEQ ID NO: 12 - DNA, 2018 bp, Homo sapiens
tcgccttccttcgggactccggatcgatctggagctccgggaatttccctggcccggccgctccgggctttccagtctcaaccatgcataaaaagggttcgccgatcttggggagccacacagcccgggtcgcaggcacctccccgccagctctcccgcttctcgcacagcttcccgacgcgtctgctgagccccatggcccacgccacgctctccgccgcccccagcaatccccggctcctgcgggtggcgctgctgctcctgctcctggtggccgccagccggcgcgcagcaggagcgtccgtggtcactgaactgcgctgccagtgcttgcagacactgcagggaattcacctcaagaacatccaaagtgtgaatgtaaggtcccccggaccccactgcgcccaaaccgaagtcatagccacactcaagaatgggaagaaagcttgtctcaaccccgcatcccccatggttcagaaaatcatcgaaaagatactgaacaagtgagttgtaatttccatatacacaggcgactggagccgttggtcagaaatactggcatctgccccctaaaaataaaatcagggaaccccaagagttagctgaaggactagaaattgtgattattattttcacaattaaagttgccattaaggttattaatctgctctggtgccagaggatatttcagtatttcagtgtcttccatttccaggcctaacccctgggagggtaaatgtgggtttctagaatactaagtaaatttgactaacaatgccaaaatgccccctgcctgttttgggacgtttacctcagtccctaatgggcttcagacctgaaaaatgcaatgtctggtttgggcactttgggcctgtaagccttcttggtgaagagcagaaactttgcagtaacaccttcagtgagttcaaggctaggatccctgtcaacattatttaatctctttgagctttagcaaaatagggtagataatggtagttatttcatagggttgtgtgcagcttaagggagatcatgaatggacatttctaacccaatgtgacaatcagtgaccaatatgttttggctttttcaaaccaagaatctagttgagtccacagccacttctttcttgaaaaaaaaaaaaaaaaagcattcaggagtgcaagttttctgctatagaaggcagtgggtacagacagaccttccctgagtggagggctgggagagagtctgcatggggacatccctccaagcaacttcagagtgacagaagagcagccttccttagcacctgcaacagtaacccttttctcatcacagggggagcaccaactgacaggagagaagtaagaagcttatcagcgtatcattgacacttcctgcagggtggtccctgcccttaccagagctgaaaatgaaaaagagaacagcagctttctagggacagctggaaaggacttaatgtgtttgactatttcttacgagggttctacttatttatgtatttatttttgaaagcttgtattttaatattttacatgctgttatttaaagatgtgagtgtgtttcatcaaacatagctcagtcctgattatttaattggaatatgatgggttttaaatgtgtcattaaactaatatttagtgggagaccataatgtgtcagccaccttgataaatgacagggtggggaactggagggtggggggattgaaatgcaagcaattagtggatcactgttagggtaagggaatgtatgtacacatctattttttatactttttttttaaaaaaagaatgtcagttgttatttattcaaattatctcacattatgtgttcaacatttttatgctgaagtttcccttagacattttatgtcttgcttgtagggcataatgccttgtttaatgtccattctgcagcgtttctctttcccttggaaaagagaatttatcattactgttacatttgtacaaatgacatgataataaaagttttatgaaaaaaaaggcttatgt

SEQ ID NO: 13 - DNA, 1299 bp, Homo sapiens
tcgccttccttcgggactccggatcgatctggagctccgggaatttccctggcccggccgctccgggctttccagtctcaaccatgcataaaaagggttcgccgatcttggggagccacacagcccgggtcgcaggcacctccccgccagctctcccgcttctcgcacagcttcccgacgcgtctgctgagccccatggcccacgccacgctctccgccgcccccagcaatccccggctcctgcgggtggcgctgctgctcctgctcctggtggccgccagccggcgcgcagcaggtgggtcccggcgccctggggtccccgggccggacgcggctggggtgggcgccccgcgccgacagccccgctcaatcagcgagtctattcttccctaggagcgtccgtggtcactgaactgcgctgccagtgcttgcagacactgcagggaattcacctcaagaacatccaaagtgtgaatgtaaggtcccccggaccccactgcgcccaaaccgaagtcatagccacactcaagaatgggaagaaagcttgtctcaaccccgcatcccccatggttcagaaaatcatcgaaaagatactgaacaaggggagcaccaactgacaggagagaagtaagaagcttatcagcgtatcattgacacttcctgcagggtggtccctgcccttaccagagctgaaaatgaaaaagagaacagcagctttctagggacagctggaaaggacttaatgtgtttgactatttcttacgagggttctacttatttatgtatttatttttgaaagcttgtattttaatattttacatgctgttatttaaagatgtgagtgtgtttcatcaaacatagctcagtcctgattatttaattggaatatgatgggttttaaatgtgtcattaaactaatatttagtgggagaccataatgtgtcagccaccttgataaatgacagggtggggaactggagggtggggggattgaaatgcaagcaattagtggatcactgttagggtaagggaatgtatgtacacatctattttttatactttttttttaaaaaaagaatgtcagttgttatttattcaaattatctcacattatgtgttcaacatttttatgctgaagtttcccttagacattttatgtcttgcttgtagggcataatgccttgtttaatgtccattctgcagcgtttctctttcccttggaaaagagaatttatcattactgttacatttgtacaaatgacatgataataaaagttttatgaaaaaaaaggcttatgt

SEQ ID NO: 14 - DNA, 1160 bp, Homo sapiens
tcgccttccttcgggactccggatcgatctggagctccgggaatttccctggcccggccgctccgggctttccagtctcaaccatgcataaaaagggttcgccgatcttggggagccacacagcccgggtcgcaggcacctccccgccagctctcccgcttctcgcacagcttcccgacgcgtctgctgagccccatggcccacgccacgctctccgccgcccccagcaatccccggctcctgcgggtggcgctgctgctcctgctcctggtggccgccagccggcgcgcagcaggagcgtccgtggtcactgaactgcgctgccagtgcttgcagacactgcagggaattcacctcaagaacatccaaagtgtgaatagccacactcaagaatgggaagaaagcttgtctcaaccccgcatcccccatggttcagaaaatcatcgaaaagatactgaacaaggggagcaccaactgacaggagagaagtaagaagcttatcagcgtatcattgacacttcctgcagggtggtccctgcccttaccagagctgaaaatgaaaaagagaacagcagctttctagggacagctggaaaggacttaatgtgtttgactatttcttacgagggttctacttatttatgtatttatttttgaaagcttgtattttaatattttacatgctgttatttaaagatgtgagtgtgtttcatcaaacatagctcagtcctgattatttaattggaatatgatgggttttaaatgtgtcattaaactaatatttagtgggagaccataatgtgtcagccaccttgataaatgacagggtggggaactggagggtggggggattgaaatgcaagcaattagtggatcactgttagggtaagggaatgtatgtacacatctattttttatactttttttttaaaaaaagaatgtcagttgttatttattcaaattatctcacattatgtgttcaacatttttatgctgaagtttcccttagacattttatgtcttgcttgtagggcataatgccttgtttaatgtccattctgcagcgtttctctttcccttggaaaagagaatttatcattactgttacatttgtacaaatgacatgataataaaagttttatgaaaaaaaaggcttatgt

SEQ ID NO: 15 - DNA, 1893 bp, Homo sapiens
gacgtcggcccgccggcgccccaccagctccgcgcgggcccgggttggccaccgccgggcccccgcccctcccccggcggtgtcccggccggaaccgatcgtggctggtttgagctggtgcgtctccatggcgacccgccggtgctataagtagggagcggcgtgccgtggggctttgtcagtccctcctgtagccgccgccgccgccgcccgccgcccctctgccagcagctccggcgccacctcgggccggcgtctccggcgggcgggagccaggcgctgacgggcgcggcgggggcggccgagcgctcctgcggctgcgactcaggctccggcgtctgcgcttccccatggggctggcctgcggcgcctgggcgctctgagattgtcactgctgttccaagggcacacgcagagggatttggaattcctggagagttgcctttgtgagaagctggaaatatttctttcaattccatctcttagttttccataggaacatcaagaaatcatgaacaactttggtaatgaagagtttgactgccacttcctcgatgaaggttttactgccaaggacattctggaccagaaaattaatgaagtttcttcttctgttggttttgcggattgccactgatgattccaaagcagtctgtcgtctcagtgtgaaattcggtgccacgctcagaaccagcaggctccttttggaacgggcgaaagagctaaatatcgatgttgttggtgtcagcttccatgtaggaagcggctgtaccgatcctgagaccttcgtgcaggcaatctctgatgcccgctgtgtttttgacatgggggctgaggttggtttcagcatgtatctgcttgatattggcggtggctttcctggatctgaggatgtgaaacttaaatttgaagagatcaccggcgtaatcaacccagcgttggacaaatactttccgtcagactctggagtgagaatcatagctgagcccggcagatactatgttgcatcagctttcacgcttgcagttaatatcattgccaagaaaattgtattaaaggaacagacgggctctgatgacgaagatgagtcgagtgagcagacctttatgtattatgtgaatgatggcgtctatggatcatttaattgcatactctatgaccacgcacatgtaaagccccttctgcaaaagagacctaaaccagatgagaagtattattcatccagcatatggggaccaacatgtgatggcctcgatcggattgttgagcgctgtgacctgcctgaaatgcatgtgggtgattggatgctctttgaaaacatgggcgcttacactgttgctgctgcctctacgttcaatggcttccagaggccgacgatctactatgtgatgtcagggcctgcgtggcaactcatgcagcaattccagaaccccgacttcccacccgaagtagaggaacaggatgccagcaccctgcctgtgtcttgtgcctgggagagtgggatgaaacgccacagagcagcctgtgcttcggctagtattaatgtgtagatagcactctggtagctgttaactgcaagtttagcttgaattaagggatttggggggaccatgtaacttaattactgctagttttgaaatgtctttgtaagagtagggtcgccatgatgcagccatatggaagactaggatatgggtcacacttatctgtgttcctatggaaactatttgaatatttgttttatatggatttttattcactcttcagacacgctactcaagagtgcccctcagctgctgaacaagcatttgtagcttgtacaatggcagaatgggccaaaagcttagtgttgtgacctgtttttaaaataaagtatcttgaaataattaggca

SEQ ID NO: 16 - DNA, 1069 bp, Homo sapiens
gcggccgcagagcactttgcccggagcccagcgtcctcccctgagttcgctgagtctcccgggaccagcaaaggctgcgcgccccgcatcggcccggaggcggggagccctgggaggcctggccgagctgcccgcagggaaatggcggagaaagcgcttctctgcccgagttcagccgggctggggacttggccctgggtcctgaactcggcatggccagttctgcctctggctgtggaccagggtgtggactggagaccgcgggggccagtctcatcggatcagatcgagcagctccatcggagatttaagcagctgagtggagatcagcctaccattcgcaaggagaacttcaacaatgtcccggacctggagctcaaccccatccgatccaaaattgttcgtgccttcttcgacaacaggaacctgcgcaagggacccagtggcctggctgatgagatcaatttcgaggacttcctgaccatcatgtcctacttccggcccatcgacaccaccatggacgaggaacaggtggagctgtcccggaaggagaagctgagatttctgttccacatgtacgactcggacagcgacggccgcatcactctggaagaatatcgaaatgtggtcgaggagctgctgtcgggaaaccctcacatcgagaaggagtccgctcgctccatcgccgacggggccatgatggaggcggccagcgtgtgcatggggcagatggagcctgatcaggtgtacgaggggatcaccttcgaggacttcctgaagatctggcaggggatcgacattgagaccaagatgcacgtccgcttccttaacatggaaaccatggccctctgccactgacccaccgccacctccgcggagaaactgcactttgcaatggggccgcctccccgcgtagctggagcagcccaggcccggcggacagcctcttcctgcagcgccggtacatagccaaggctcgtctgcgcaccttgtgtcttgtagggtatggtatgtgggacttcgctgtttttatctccaataaaaaaaaaaaaaaggtttgttaattaat

SEQ ID NO: 17 - DNA, 1554 bp, Homo sapiens
gggaggagggggccgggccgactggcggccgaaagggaggtgggggcggggtctggcccccgcggcgggctggggggccggggtgcggggtccgggcggggcgggcccgcgctcacttcctcggggaggggttggggccgcgctcccactcgcccacacggtccgtctgcagtcggcagcctcgccggcagctcgctcggcccccgcttggcccggcccgcaggagctgttctatgaagaccgccatttccacgagggctgcttccgctgctgccgctgccagcgctcactagccgatgaacccttcacctgccaggacagtgagctgctctgcaatgactgctactgcagtgcgttttcctcgcagtgctccgcttgtggggagactgtcatgcctgggtcccggaagctggaatatggaggccagacatggcatgagcactgcttcctgtgcagtggctgtgaacagccactgggctcccgttcttttgtgcccgacaagggtgctcactactgcgtgccctgctatgagaacaagtttgctcctcgctgcgcccgctgcagcaagacgctgacacagggtggagtgacataccgtgatcagccgtggcatcgagaatgtctggtctgtaccggatgccagacgcccctggcagggcagcagttcacctcccgggatgaagatccctactgtgtggcctgttttggagaactctttgcacctaagtgcagcagctgcaagcgccccatcgtaggactcggtggaggcaagtatgtgtcctttgaagaccgacactggcaccacaactgcttctcctgcgcccgctgctctacctccctggtgggccagggcttcgtaccggatggagaccaagtgctctgccagggctgtagccaggcagggccctaagccagggctcctggacccaggctttcccataccacgggcccaggactgtggctccttttctaaaccacctctgggactcagctccccccgccaaaaaaaatgggtctccttctgggctccaggattgtctccccactccagcatccccaaactggtactccctgacccaggcccccaatcctgggctcttacagagcctccatgagtcaagccccctccccacacctggactccagaattcaccctctcccctgcagtctgggttcccagactgagtcctctccccaaatcagggctctagacccgagccctccaaacctggactctgggacttaggcccccttaaatctagacttctctttataggtttcaggtctcctatgggtgcctgggaagtccttgaaagtggactgttctcaggcttgacctgccccaccccatccccgcggttgaggctgtgggggcagcagatcaggagcccactgataaggggccctagggtacagggtgctgcccagcaggtcgccaccgagtgtcttctcattttatttcagctccattttgcccatagatgggcagaggggtgagattggctcatcccccttccagattctgcaataaagcggtgtgaggaagcaggggcc

SEQ ID NO: 18 - DNA, 1466 bp, Homo sapiens
gggaggagggggccgggccgactggcggccgaaagggaggtgggggcggggtctggcccccgcggcgggctggggggccggggtgcggggtccgggcggggcgggcccgcgctcacttcctcggggaggggttggggccgcgctcccactcgcccacacggtccgtctgcagtcggcagcctcgccggcagctcgctcggcccccgcttggcccggcccgcaggtaggagccgccgagggacgcggcgcccggttcccggccccgcctgcgccgcgcgctccccgctcccgccgcccgcttcgaggagctgttctatgaagaccgccatttccacgagggctgcttccgctgctgccgctgccagcgctcactagccgatgaacccttcacctgccaggacagtgagctgctctgcaatgactgctactgcagtgcgttttcctcgcagtgctccgcttgtggggagactgtcatgcctgacgctgacacagggtggagtgacataccgtgatcagccgtggcatcgagaatgtctggtctgtaccggatgccagacgcccctggcagggcagcagttcacctcccgggatgaagatccctactgtgtggcctgttttggagaactctttgcacctaagtgcagcagctgcaagcgccccatcgtaggactcggtggaggcaagtatgtgtcctttgaagaccgacactggcaccacaactgcttctcctgcgcccgctgctctacctccctggtgggccagggcttcgtaccggatggagaccaagtgctctgccagggctgtagccaggcagggccctaagccagggctcctggacccaggctttcccataccacgggcccaggactgtggctccttttctaaaccacctctgggactcagctccccccgccaaaaaaaatgggtctccttctgggctccaggattgtctccccactccagcatccccaaactggtactccctgacccaggcccccaatcctgggctcttacagagcctccatgagtcaagccccctccccacacctggactccagaattcaccctctcccctgcagtctgggttcccagactgagtcctctccccaaatcagggctctagacccgagccctccaaacctggactctgggacttaggcccccttaaatctagacttctctttataggtttcaggtctcctatgggtgcctgggaagtccttgaaagtggactgttctcaggcttgacctgccccaccccatccccgcggttgaggctgtgggggcagcagatcaggagcccactgataaggggccctagggtacagggtgctgcccagcaggtcgccaccgagtgtcttctcattttatttcagctccattttgcccatagatgggcagaggggtgagattggctcatcccccttccagattctgcaataaagcggtgtgaggaagcaggggcc

SEQ ID NO: 19 - DNA, 2110 bp, Homo sapiens
tctgcaggaggggagctgggaacgacctgagctaaagctcggagctgtgcgaagaaaccggaaaagcccagagcacttgcaggggcgggtggggagctagatggtggggtggggtggggacggaggagggccagcaggagacattccgcagggaggggcaagcacgtgtgaggcgggcggggcgcgaagggtcaggcttttgctcaaaacaggcagaggacaaggtcagctcagccgcagaccgagccgctggtgactgtctccgccaccaggcagtgagagtgaagggagagcgcgagctctgaagcccgctagactaagcttgcaatctgagctccattcaccccctcctatttcttgagaccttgtcagttcccctgtgagcctcggactcctcacttgtaaaacgaggacagatgcccgtgccagaagtcaaccagagctttccccggcgtgggcaccagcccaagggcgttttgcttttctagtctcatctctgctctgacgctaagctcaaagagggactgggggacgggaagatatccaccatggcatgcgccctagctctcgggctggtgttggctgcttccttctcagattccagagtgcctagaggccaggaaagggagaaggtcctaccagcctggggtagggactcgggggccaggcactggcgctgacgcaggctagcagggcgccactggctggtccccacccacctcggtgggttgggggatgggcgcaccagcccctcctgggtgagccctagcctggggcttcctatttcgggagccgggggcgtgggccacgtctcctcatgtgatgcgagggctatttaaagcggcagcccgggcagggagccgccgtcggagcccttgcacgcctgctctcttgtagcttctctcagcctagcccagcatcactatggtggacgctttcctgggcacctggaagctagtggacagcaagaatttcgatgactacatgaagtcactcggtgtgggttttgctaccaggcaggtggccagcatgaccaagcctaccacaatcatcgaaaagaatggggacattctcaccctaaaaacacacagcaccttcaagaacacagagatcagctttaagttgggggtggagttcgatgagacaacagcagatgacaggaaggtcaagtccattgtgacactggatggagggaaacttgttcacctgcagaaatgggacgggcaagagaccacacttgtgcgggagctaattgatggaaaactcatcctggtaagatgggcaactttggagctatatctgattggttattactactgctctttcagccaagcctgttctaaaaagccaagtcctcccctgagagctgtagaagctgggacaagagagtggttgtgggtcagggtggtatcaggtgggaattttctgtgtagtggctttggactcacacaggccggaactcaaatcttaccttataggctacatgactgtgggcaaatcaccttttccaagtgcaactgtaaaacgggtattaataataccaaccttgtagggctgctgggaagcctgtaagagacagtgtatgcacagcacaaagcatcactgattgaggaacacagcaggtgctccatgtcctttgtttgctcttcctgtgtttctaccttgcctcacctcaggaagaagtagaaaacagggccaaatctgatcccaggccctctaggaggggctcccattgcctatctcagcattccctttcctctcctccctaggactgcattgtcacttgcagggacaggctcgtgactggtggggacactgaatgacagtacagtcctttcttccccattctagtcctaccccattttcatgctttctatgtctggcctactgaaactacttgactactgcttgggtaggaagtaccacagccaggctggcagatctgttcaagcttggggacttcacttggagaatctagccttgactgaattccccccagacccagggagagcagccaactgtggattctgcctaaccacagggcctcaggttttcacctaggcatcttcactgcacaccttcttgggtcagcataacctgttaactgcat

SEQ ID NO: 20 - DNA, 1733 bp, Homo sapiens
tctgcaggaggggagctgggaacgacctgagctaaagctcggagctgtgcgaagaaaccggaaaagcccagagcacttgcaggggcgggtggggagctagatggtggggtggggtggggacggaggagggccagcaggagacattccgcagggaggggcaagcacgtgtgaggcgggcggggcgcgaagggtcaggcttttgctcaaaacaggcagaggacaaggtcagctcagccgcagaccgagccgctggtgactgtctccgccaccaggcagtgagagtgaagggagagcgcgagctctgaagcccgctagactaagcttgcaatctgagctccattcaccccctcctatttcttgagaccttgtcagttcccctgtgagcctcggactcctcacttgtaaaacgaggacagatgcccgtgccagaagtcaaccagagctttccccggcgtgggcaccagcccaagggcgttttgcttttctagtctcatctctgctctgacgctaagctcaaagagggactgggggacgggaagatatccaccatggcatgcgccctagctctcgggctggtgttggctgcttccttctcagattccagagtgcctagaggccaggaaagggagaaggtcctaccagcctggggtagggactcgggggccaggcactggcgctgacgcaggctagcagggcgccactggctggtccccacccacctcggtgggttgggggatgggcgcaccagcccctcctgggtgagccctagcctggggcttcctatttcgggagccgggggcgtgggccacgtctcctcatgtgatgcgagggctatttaaagcggcagcccgggcagggagccgccgtcggagcccttgcacgcctgctctcttgtagcttctctcagcctagcccagcatcactatggtggacgctttcctgggcacctggaagctagtggacagcaagaatttcgatgactacatgaagtcactcggtgtgggttttgctaccaggcaggtggccagcatgaccaagcctaccacaatcatcgaaaagaatggggacattctcaccctaaaaacacacagcaccttcaagaacacagagatcagctttaagttgggggtggagttcgatgagacaacagcagatgacaggaaggtcaagtccattgtgacactggatggagggaaacttgttcacctgcagaaatgggacgggcaagagaccacacttgtgcgggagctaattgatggaaaactcatcctggatgttctgacagcctggccaagcatctacaggagacaagtcaaagttttaagagaagatgaaataacaattcttccttggcatctccaatggagtagagagaaggcaacaaagcttctcagacccacattaccgagctataacaaccatggctgggaggagctgagagttggcaaatcaatagtttagctatgttgctgaaccttcctggatggcaagaccatggaagtccatcacaagatattatggggtcaggagcctcactgggttctgccccttatataggtgaatatcctgggaaagtaaaaatgaaaatacagagtctggcaccagttccctgcaagcctggtccagcctggataaagaagtgaggagagtaataatactgccttacacctaaacagtgctttagtttatcaagctttttgcatccttatcttacaataatagtctgtagagtc

SEQ ID NO: 21 - DNA, 1822 bp, Homo sapiens
tctgcaggaggggagctgggaacgacctgagctaaagctcggagctgtgcgaagaaaccggaaaagcccagagcacttgcaggggcgggtggggagctagatggtggggtggggtggggacggaggagggccagcaggagacattccgcagggaggggcaagcacgtgtgaggcgggcggggcgcgaagggtcaggcttttgctcaaaacaggcagaggacaaggtcagctcagccgcagaccgagccgctggtgactgtctccgccaccaggcagtgagagtgaagggagagcgcgagctctgaagcccgctagactaagcttgcaatctgagctccattcaccccctcctatttcttgagaccttgtcagttcccctgtgagcctcggactcctcacttgtaaaacgaggacagatgcccgtgccagaagtcaaccagagctttccccggcgtgggcaccagcccaagggcgttttgcttttctagtctcatctctgctctgacgctaagctcaaagagggactgggggacgggaagatatccaccatggcatgcgccctagctctcgggctggtgttggctgcttccttctcagattccagagtgcctagaggccaggaaagggagaaggtcctaccagcctggggtagggactcgggggccaggcactggcgctgacgcaggctagcagggcgccactggctggtccccacccacctcggtgggttgggggatgggcgcaccagcccctcctgggtgagccctagcctggggcttcctatttcgggagccgggggcgtgggccacgtctcctcatgtgatgcgagggctatttaaagcggcagcccgggcagggagccgccgtcggagcccttgcacgcctgctctcttgtagcttctctcagcctagcccagcatcactatggtggacgctttcctgggcacctggaagctagtggacagcaagaatttcgatgactacatgaagtcactcggtgtgggttttgctaccaggcaggtggccagcatgaccaagcctaccacaatcatcgaaaagaatggggacattctcaccctaaaaacacacagcaccttcaagaacacagagatcagctttaagttgggggtggagttcgatgagacaacagcagatgacaggaaggtcaagtccattgtgacactggatggagggaaacttgttcacctgcagaaatgggacgggcaagagaccacacttgtgcgggagctaattgatggaaaactcatcctgatggaaaaactgcaactcagaaatgtaaagtgagtcgaccaaggctaaagcggcaaaaccactatactttataacacagagtttggcactatttccactttgttctctctcaaagatgaaggctcaggaggagggaagataaaaacaaatcactggagagtcctggcatgctggaacatggactctagctagcaagaagggctcaaggaggtggccttctcctagacctcaactttgatgcaaaagctgttttgcagcctgaacaaagacaatccaatcctccagcaaatggcgtcattttccctacgtgtctagccttgagctacagaacaaaagaacaatcacatccgaagttgtagttcgcctggttgcggtggctcacgcctgtgatcccagcactttgggaggccaaggtgggtggatcacctgaggtcaggaggtcgagactagcctgaccaacatgaagaaaccccatctctactaaaaatacaaaattagctgggcgtggtggcacatgcctgtaatcccagctactcgggaggctgaggca

SEQ ID NO: 22 - DNA, 3531 bp, Homo sapiens
tctgcaggaggggagctgggaacgacctgagctaaagctcggagctgtgcgaagaaaccggaaaagcccagagcacttgcaggggcgggtggggagctagatggtggggtggggtggggacggaggagggccagcaggagacattccgcagggaggggcaagcacgtgtgaggcgggcggggcgcgaagggtcaggcttttgctcaaaacaggcagaggacaaggtcagctcagccgcagaccgagccgctggtgactgtctccgccaccaggcagtgagagtgaagggagagcgcgagctctgaagcccgctagactaagcttgcaatctgagctccattcaccccctcctatttcttgagaccttgtcagttcccctgtgagcctcggactcctcacttgtaaaacgaggacagatgcccgtgccagaagtcaaccagagctttccccggcgtgggcaccagcccaagggcgttttgcttttctagtctcatctctgctctgacgctaagctcaaagagggactgggggacgggaagatatccaccatggcatgcgccctagctctcgggctggtgttggctgcttccttctcagattccagagtgcctagaggccaggaaagggagaaggtcctaccagcctggggtagggactcgggggccaggcactggcgctgacgcaggctagcagggcgccactggctggtccccacccacctcggtgggttgggggatgggcgcaccagcccctcctgggtgagccctagcctggggcttcctatttcgggagccgggggcgtgggccacgtctcctcatgtgatgcgagggctatttaaagcggcagcccgggcagggagccgccgtcggagcccttgcacgcctgctctcttgtagcttctctcagcctagcccagcatcactatggtggacgctttcctgggcacctggaagctagtggacagcaagaatttcgatgactacatgaagtcactcgctcatatactcataaccttccccctaccctcaggtgtgggttttgctaccaggcaggtggccagcatgaccaagcctaccacaatcatcgaaaagaatggggacattctcaccctaaaaacacacagcaccttcaagaacacagagatcagctttaagttgggggtggagttcgatgagacaacagcagatgacaggaaggtcaagtccattgtgacactggatggagggaaacttgttcacctgcagaaatgggacgggcaagagaccacacttgtgcgggagctaattgatggaaaactcatcctgacactcacccacggcactgcagtttgcactcgcacttatgagaaagaggcatgacctgactgcactgttgctgactactactctgccaatcggctacccctcgactcagcaccacattgcctcatttcttcctctgcattttgtacaaatccacgaattcttctggggtcaggtgccactgaccgggatccagttccagttcccatggtgtatgtggttttttttttttttttttaactgcactcatagggtgctctgaggtcaataaagcagagccaaggccacccagttgcctttttgcctttggtaacataactctgggagtcttggtttatcctgtgtgtcagagagtgggcagaaataacggcctgaaggttactgaggaagaagcactggatgggagactgaaatggacagtctcggagcctgttaatcagctgatcaccttacacatttaataataaaagagctgtacctacacgttgcctttacactgccccccctccatggtcaaatgacctagttcagtcagtgatggggcttccccaggtttggctattgaactgtcacttcaggcccatcctacactgaaagctcttgggtctggctgttctctgtgaaatgctgtagtctctccctttccagaattcaggttcagggcacagaacccaggcttgtaccatggtggtgggagaaaatgaccactggccaagaggactgctgacctgtgcaccaggctagtacttatgactacaaattcttactgcttctctaatcaactctgagggaagagggcatctgatcattacaaaagggagggcttataagtgatctcccaagaaggcagtgatctgctagtgcctttggctctgtacctctgctgggcatctctccaaggtctaaggtaacatattaaatgtttttgtcagctaatgcaggctcagtgactttaagtctgtaagttacccaggaagaaggattataggaaaaataactcagtaagtttaaaaccaaacacatttccatttagtgacaggaatttaagcaaggacctgaagtagaatcaactgattcacacagtagtaaatacaaagtagaacaatgatcttggcttcgctgtctggttcagtggtctgctggaatgcaatacacaagttaagtcacactgcagactgttttctagctgtggccgctggatgccacttctagcatagtagaactatgttaggaggaatgggaaaagtgagcaccacttctcaccatgttcccccctcctgctgccagtctctgctcccatgttggatgcagcagagatcacccaccagttggcccaggacagaccaataggaagggtccaatcactctaactacagccgaactcacctccacaacagtctctgtggctctagcctggactcctttacaggaatccagctctggcagtggcagctggagagggtaatagggcctcctgctgaatgaaggaagttgggtgaatgaatgggtgagctgcagggttcacttgcaaagggaccaggagtgataaggaaacaacaactcattcaggcagctgcttttgacctctaactcccaaacctgcctgttgcatgaggggaagccatctcccatgggagcgaagttaatggggtgggaggctatattctcactattgagtctttccaggagtctcaaggcacaaggctcctggtttcttactctcaaccaccccctacactctttatactctcactccttgtgcttcttcttgtgcttcttcttctttttcttcttctttgctgccttgctgtcttttgatgtgtgccttgccctcttgcctgtatcactctcagagtctgagctgtcagagtcagatgacttcctatctctatgtttctttttcttcttctcctgaaaagaaaattttaaaaatcaacactgtatgtgtatatttgcttttaacaatcatagcacataattggccaggtgcagtggctcacacctgtaatcctagtactttgggaagccgaggtgggaggaatgcttgaggccaggagttcaagatcaacctggctaacatagcaagatctcatctctaaaaagagaaaaaaagaaaaattatagcacacaatcaataggggaccacttaattttcttttagacagtctcgctctgttgcccaggctagagtgcagtgcagtggcacgatcacagctcactgcaacctca

SEQ ID NO: 23 - DNA, 3429 bp, Homo sapiens
cctggaccctggggcgtgaggagggcgcggtgcgtcccgtggttgtgcttggaagccccccgagggtgcgcgcgcgtgggtatgagtgcgtgcgtgtgcctgggtgtgcgtgtgtgtaagtgtgcacgtgtgtgtgtgagagtgcgcgcggggaaggaggcacagagacagcccggacaggccactgcgcagccctggtggcccccgctccacctctcgctccgcagacccgcgccagggaggcctctgggccgcagcgggcaccggagcggagcgggcgcggcagcgggcgctgggaggtggggctgggggaggagagggggagggagagaggcgggcgggaggggaggatccgggaagctccggggtatttgacaggagcgagggcggacgcaaagaacgcggaggacctctgggtgcctgcaggggagctgctccagccgggccgccgggagcggtggggagagcatcgcggagccgcccctccacgcgcccgcccagccgcgctcgcccactgggctctcccggctgcagtgccagggcgcaggacgcggccgatctcccgctcccgccacctccgccaccatgctgctcccccagctctgctggctgccgctgctcgctgggctgctcccgccggtgcccgctcagaagttctcggcgctcacgtttttgagagtggatcaagataaagacaaggattgtagcttggactgtgcgggttcgccccagaaacctctctgcgcatctgacggaaggaccttcctttcccgttgtgaatttcaacgtgccaagtgcaaagatccccagctagagattgcatatcgaggaaactgcaaagacgtgtccaggtgtgtggccgaaaggaagtatacccaggagcaagcccggaaggagtttcagcaagtgttcattcctgagtgcaatgacgacggcacctacagtcaggtccagtgtcacagctacacgggatactgctggtgcgtcacgcccaacgggaggcccatcagcggcactgccgtggcccacaagacgccccggtgcccgggttccgtaaatgaaaagttaccccaacgcgaaggcacaggaaaaacagatattgcatcacgttaccctaccctttggactgaacaggttaaaagtcggcagaacaaaaccaataagaattcagtgtcatcctgtgaccaagagcaccagtctgccctggaggaagccaagcagcccaagaacgacaatgtggtgatccctgagtgtgcgcacggcggcctctacaagccagtgcagtgccacccctccacggggtactgctggtgcgtcctggtggacacggggcgccccattcccggcacatccacaaggtacgagcagccgaaatgtgacaacacggccagggcccacccagccaaagcccgggacctgtacaagggccgccagctacaaggttgtccgggtgccaaaaagcatgagtttctgaccagcgttctggacgcgctgtccacggacatggtccacgccgcctccgacccctcctcctcgtcaggcaggctctcagaacccgaccccagccataccctagaggagcgggtggtgcactggtacttcaaactactggataaaaactccagtggagacatcggcaaaaaggaaatcaaacccttcaagaggttccttcgcaaaaaatcaaagcccaaaaaatgtgtgaagaagtttgttgaatactgtgacgtgaataatgacaaatccatctccgtacaagaactgatgggctgcctgggcgtggcgaaagaggacggcaaagcggacaccaagaaacgccacacccccagaggtcatgctgaaagtacgtctaatagacagccaaggaaacaaggataaatggctcataccccgaaggcagttcctagacacatgggaaatttccctcaccaaagagcaattaagaaaacaaaaacagaaacacatagtatttgcactttgtactttaaatgtaaattcactttgtagaaatgagctatttaaacagactgttttaatctgtgaaaatggagagctggcttcagaaaattaatcacatacaatgtatgtgtcctcttttgaccttggaaatctgtatgtggtggagaagtatttgaatgcatttaggcttaatttcttcgccttccatatgttaacagtagagctctatgcactccggctgcaatcgtatggctttctctaacccctgcagtcacttccagatgcctgtgcttacagcattgtggaatcatgttggaagctccacatgtccatggaagtttgtgatgtacggccgaccctacaggcagttaacatgcatgggctggtttgtttcttgggattttctgttagtttgtcttgttttgctttccagagatcttgctcatacaatgaatcacgcaaccactaaagctatccagttaagtgcaggtagttcccctggaggaaataatattttcaaactgtcgttggtgtgatactttggctcaaaggatctttgcttttccattttaagcttctgttttgagttttgccctggggcttgaatgagtcccagagagtcgttcggatggtgggaggctgcctaggaggcagtaaatccagtcacagtgcctgggaggggcccatccttccaaaatgtaaatccagtcgcggtgtgaccgagctggctaacaggcttgtctgcctggttttcctcctacacgtggacattattctcctgatcctcctacctggtccaccccagggctaccggaaggtaaaatcttcacctgaaccaattatgagcagtctccttactgaaggtacagccggatacgtggtgcccccggggctggtgttggcagccggggggaggtgcctgagggtccccacggttcctttctgcttttctgaatgcatcaagggtacgagaacttgccaatgggaaattcatccgagtggcactggcagagaaggataggagtggaatgcccacacagtgaccaacagaactggtctgcgtgcataaccagctgccaccctcaggcctgggccccagagctcagggcacccagtgtcttaaggaaccatttggaggacagtctgagagcaggaacttcaagctgtgattctatctcggctcagacttttggttggaaaaagatcttcatggccccaaatcccctgagacatgccttgtagaatgattttgtgatgttgtgatgcttgtggagcatcgcgtaaggcttcttgcttatttaaactgtgcaaggtaaaaatcaagcctttggagccacagaaccagctcaagtacatgccaatgttgtttaagaaacagttatgatcctaaactttttggataatcttttatatttctgacctttgaatttaatcattgttcttagattaaaataaaatatgctattgaaacta

SEQ ID NO: 24 - DNA, 5165 bp, Homo sapiens
cctggaccctggggcgtgaggagggcgcggtgcgtcccgtggttgtgcttggaagccccccgagggtgcgcgcgcgtgggtatgagtgcgtgcgtgtgcctgggtgtgcgtgtgtgtaagtgtgcacgtgtgtgtgtgagagtgcgcgcggggaaggaggcacagagacagcccggacaggccactgcgcagccctggtggcccccgctccacctctcgctccgcagacccgcgccagggaggcctctgggccgcagcgggcaccggagcggagcgggcgcggcagcgggcgctgggaggtggggctgggggaggagagggggagggagagaggcgggcgggaggggaggatccgggaagctccggggtatttgacaggagcgagggcggacgcaaagaacgcggaggacctctgggtgcctgcaggggagctgctccagccgggccgccgggagcggtggggagagcatcgcggagccgcccctccacgcgcccgcccagccgcgctcgcccactgggctctcccggctgcagtgccagggcgcaggacgcggccgatctcccgctcccgccacctccgccaccatgctgctcccccagctctgctggctgccgctgctcgctgggctgctcccgccggtgcccgctcagaagttctcggcgctcacgtttttgagagtggatcaagataaagacaaggattgtagcttggactgtgcgggttcgccccagaaacctctctgcgcatctgacggaaggaccttcctttcccgttgtgaatttcaacgtgccaagtgcaaagatccccagctagagattgcatatcgaggaaactgcaaagacgtgtccaggtgtgtggccgaaaggaagtatacccaggagcaagcccggaaggagtttcagcaagtgttcattcctgagtgcaatgacgacggcacctacagtcaggtccagtgtcacagctacacgggatactgctggtgcgtcacgcccaacgggaggcccatcagcggcactgccgtggcccacaagacgccccggtgcccgggttccgtaaatgaaaagttaccccaacgcgaaggcacaggaaaaacagatgatgccgcagctccagcgttggagactcagcctcaaggagatgaagaagatattgcatcacgttaccctaccctttggactgaacaggttaaaagtcggcagaacaaaaccaataagaattcagtgtcatcctgtgaccaagagcaccagtctgccctggaggaagccaagcagcccaagaacgacaatgtggtgatccctgagtgtgcgcacggcggcctctacaagccagtgcagtgccacccctccacggggtactgctggtgcgtcctggtggacacggggcgccccattcccggcacatccacaaggtacgagcagccgaaatgtgacaacacggccagggcccacccagccaaagcccgggacctgtacaagggccgccagctacaaggttgtccgggtgccaaaaagcatgagtttctgaccagcgttctggacgcgctgtccacggacatggtccacgccgcctccgacccctcctcctcgtcaggcaggctctcagaacccgaccccagccataccctagaggagcgggtggtgcactggtacttcaaactactggataaaaactccagtggagacatcggcaaaaaggaaatcaaacccttcaagaggttccttcgcaaaaaatcaaagcccaaaaaatgtgtgaagaagtttgttgaatactgtgacgtgaataatgacaaatccatctccgtacaagaactgatgggctgcctgggcgtggcgaaagaggacggcaaagcggacaccaagaaacgccacacccccagaggtcatgctgaaagtacgtctaatagacaggatgcaatggtggtgtcctccagacccaaagccacaacccatcgcaagtcaagaacactttccagaagataaacatgagtgggttcatgtctctctccttcaaagccaggacaaaatccccacttctttgctgccgcgagtcaatttgtgatttattttgtctgcacctgtttgatgccaggtcgacatttcctaaggcaagcccctgtatttgttgtggatttaagtggaggcggccagcacacaccttggatgtaatttaaaaccatttcctgaggaaagatgtgtgatatgctttcctttgtttagcaaatgtttatggttttaactttaaatctcaccgcaaatcacttacacttgaaaacagggctggtctgaaagtaattaccctccctgagtgccaagacctccagaagttgttttcattcccgaatggcaatcactgtactcatgcgctccacgcatcttaaataaactcagttcaaagcacatgcctcctgcttcagctcttttttccaaaaagagaaacagaagcaggttccccctccttttatagtgcctgcgtggacacgcggacctccatgcctttcatgctgtggctatgtcagcaaactacgatattgggatgatcctaacgggcaagccagctgcggctcctaccggccgtggccattgaaggccaccatgttgctttgaaacatctcaaagaataacatagtgccagccagcaagggtttcaccatatgcatgacccagacaggaactatcaaaagaagggatcacgggaaggtgcatgatgctaatgtggaatccagaggagctctttcctgatctcttcagcttccgctgccactccagaatcatcagagctgatattaaataagttaaaatgttagtccaccgtctcctcctgcaatcctaaccatcttttgagactgttagaatactttgacgggttgtctttctgtgcaactaatttaaacctcaagtttagtgtaggagatgggtttgtcttctcacctcttcagatctttatcaagggggaataaaagccaacccagaaacctaaactttaaaatttaattatttgaaataataaaacagaagaagggatcaacatttgtcggaattggcactcttggaaaactaagtctaggagatcatatattgctttttttttttcattctaaattacttttaattgaaagtcaagatgctgagttacagttgtttatcattataataagcaaactttttaagttggatttcttcttaaagaggtaaactagtgaacaaaaaagataaaaaggaaaattaagaatcaactatgcctttatcaaatttgaagcataagttatattattaaaattatttttgtataatcaaggtgataagacattctggaaaacatttaatgtatttagtacttagaatatttacagtggatgttacttttttgaaacgatatatttttcccaatttttctatcatgtcaaggaaggaaactgttaagaagttaccagtgtccaaaatgtcttcattgtttcttactcatacttacacctcacatgacctgcccagccctctttggttcagttcattcccagaagccaagccttagtcttcacagatgagcgacacacacctctgaatataatgtctcttttttgttttttccttttcagccaaggaaacaaggataaatggctcataccccgaaggcagttcctagacacatgggaaatttccctcaccaaagagcaattaagaaaacaaaaacagaaacacatagtatttgcactttgtactttaaatgtaaattcactttgtagaaatgagctatttaaacagactgttttaatctgtgaaaatggagagctggcttcagaaaattaatcacatacaatgtatgtgtcctcttttgaccttggaaatctgtatgtggtggagaagtatttgaatgcatttaggcttaatttcttcgccttccatatgttaacagtagagctctatgcactccggctgcaatcgtatggctttctctaacccctgcagtcacttccagatgcctgtgcttacagcattgtggaatcatgttggaagctccacatgtccatggaagtttgtgatgtacggccgaccctacaggcagttaacatgcatgggctggtttgtttcttgggattttctgttagtttgtcttgttttgctttccagagatcttgctcatacaatgaatcacgcaaccactaaagctatccagttaagtgcaggtagttcccctggaggaaataatattttcaaactgtcgttggtgtgatactttggctcaaaggatctttgcttttccattttaagcttctgttttgagttttgccctggggcttgaatgagtcccagagagtcgttcggatggtgggaggctgcctaggaggcagtaaatccagtcacagtgcctgggaggggcccatccttccaaaatgtaaatccagtcgcggtgtgaccgagctggctaacaggcttgtctgcctggttttcctcctacacgtggacattattctcctgatcctcctacctggtccaccccagggctaccggaaggtaaaatcttcacctgaaccaattatgagcagtctccttactgaaggtacagccggatacgtggtgcccccggggctggtgttggcagccggggggaggtgcctgagggtccccacggttcctttctgcttttctgaatgcatcaagggtacgagaacttgccaatgggaaattcatccgagtggcactggcagagaaggataggagtggaatgcccacacagtgaccaacagaactggtctgcgtgcataaccagctgccaccctcaggcctgggccccagagctcagggcacccagtgtcttaaggaaccatttggaggacagtctgagagcaggaacttcaagctgtgattctatctcggctcagacttttggttggaaaaagatcttcatggccccaaatcccctgagacatgccttgtagaatgattttgtgatgttgtgatgcttgtggagcatcgcgtaaggcttcttgcttatttaaactgtgcaaggtaaaaatcaagcctttggagccacagaaccagctcaagtacatgccaatgttgtttaagaaacagttatgatcctaaactttttggataatcttttatatttctgacctttgaatttaatcattgttcttagattaaaataaaatatgctattgaaacta

SEQ ID NO: 25 - DNA, 3575 bp, Homo sapiens
cctggaccctggggcgtgaggagggcgcggtgcgtcccgtggttgtgcttggaagccccccgagggtgcgcgcgcgtgggtatgagtgcgtgcgtgtgcctgggtgtgcgtgtgtgtaagtgtgcacgtgtgtgtgtgagagtgcgcgcggggaaggaggcacagagacagcccggacaggccactgcgcagccctggtggcccccgctccacctctcgctccgcagacccgcgccagggaggcctctgggccgcagcgggcaccggagcggagcgggcgcggcagcgggcgctgggaggtggggctgggggaggagagggggagggagagaggcgggcgggaggggaggatccgggaagctccggggtatttgacaggagcgagggcggacgcaaagaacgcggaggacctctgggtgcctgcaggggagctgctccagccgggccgccgggagcggtggggagagcatcgcggagccgcccctccacgcgcccgcccagccgcgctcgcccactgggctctcccggctgcagtgccagggcgcaggacgcggccgatctcccgctcccgccacctccgccaccatgctgctcccccagctctgctggctgccgctgctcgctgggctgctcccgccggtgcccgctcagaagttctcggcgctcacgtttttgagagtggatcaagataaagacaaggattgtagcttggactgtgcgggttcgccccagaaacctctctgcgcatctgacggaaggaccttcctttcccgttgtgaatttcaacgtgccaagtgcaaagatccccagctagagattgcatatcgaggaaactgcaaagacgtgtccaggtgtgtggccgaaaggaagtatacccaggagcaagcccggaaggagtttcagcaagtgttcattcctgagtgcaatgacgacggcacctacagtcaggtccagtgtcacagctacacgggatactgctggtgcgtcacgcccaacgggaggcccatcagcggcactgccgtggcccacaagacgccccggtgcccgggttccgtaaatgaaaagttaccccaacgcgaaggcacaggaaaaacagatgatgccgcagctccagcgttggagactcagcctcaaggagatgaagaagatattgcatcacgttaccctaccctttggactgaacaggttaaaagtcggcagaacaaaaccaataagaattcagtgtcatcctgtgaccaagagcaccagtctgccctggaggaagccaagcagcccaagaacgacaatgtggtgatccctgagtgtgcgcacggcggcctctacaagccagtgcagtgccacccctccacggggtactgctggtgcgtcctggtggacacggggcgccccattcccggcacatccacaaggtacgagcagccgaaatgtgacaacacggccagggcccacccagccaaagcccgggacctgtacaagggccgccagctacaaggttgtccgggtgccaaaaagcatgagtttctgaccagcgttctggacgcgctgtccacggacatggtccacgccgcctccgacccctcctcctcgtcaggcaggctctcagaacccgaccccagccataccctagaggagcgggtggtgcactggtacttcaaactactggataaaaactccagtggagacatcggcaaaaaggaaatcaaacccttcaagaggttccttcgcaaaaaatcaaagcccaaaaaatgtgtgaagaagtttgttgaatactgtgacgtgaataatgacaaatccatctccgtacaagaactgatgggctgcctgggcgtggcgaaagaggacggcaaagcggacaccaagaaacgccacagaagtaagagaaacctgtgatggccagagcccagatgttcttaggaggcaagccaggagaagccgggtctgacttttcagctcagagacagcactcccccagaggtcatgctgaaagtacgtctaatagacagccaaggaaacaaggataaatggctcataccccgaaggcagttcctagacacatgggaaatttccctcaccaaagagcaattaagaaaacaaaaacagaaacacatagtatttgcactttgtactttaaatgtaaattcactttgtagaaatgagctatttaaacagactgttttaatctgtgaaaatggagagctggcttcagaaaattaatcacatacaatgtatgtgtcctcttttgaccttggaaatctgtatgtggtggagaagtatttgaatgcatttaggcttaatttcttcgccttccatatgttaacagtagagctctatgcactccggctgcaatcgtatggctttctctaacccctgcagtcacttccagatgcctgtgcttacagcattgtggaatcatgttggaagctccacatgtccatggaagtttgtgatgtacggccgaccctacaggcagttaacatgcatgggctggtttgtttcttgggattttctgttagtttgtcttgttttgctttccagagatcttgctcatacaatgaatcacgcaaccactaaagctatccagttaagtgcaggtagttcccctggaggaaataatattttcaaactgtcgttggtgtgatactttggctcaaaggatctttgcttttccattttaagcttctgttttgagttttgccctggggcttgaatgagtcccagagagtcgttcggatggtgggaggctgcctaggaggcagtaaatccagtcacagtgcctgggaggggcccatccttccaaaatgtaaatccagtcgcggtgtgaccgagctggctaacaggcttgtctgcctggttttcctcctacacgtggacattattctcctgatcctcctacctggtccaccccagggctaccggaaggtaaaatcttcacctgaaccaattatgagcagtctccttactgaaggtacagccggatacgtggtgcccccggggctggtgttggcagccggggggaggtgcctgagggtccccacggttcctttctgcttttctgaatgcatcaagggtacgagaacttgccaatgggaaattcatccgagtggcactggcagagaaggataggagtggaatgcccacacagtgaccaacagaactggtctgcgtgcataaccagctgccaccctcaggcctgggccccagagctcagggcacccagtgtcttaaggaaccatttggaggacagtctgagagcaggaacttcaagctgtgattctatctcggctcagacttttggttggaaaaagatcttcatggccccaaatcccctgagacatgccttgtagaatgattttgtgatgttgtgatgcttgtggagcatcgcgtaaggcttcttgcttatttaaactgtgcaaggtaaaaatcaagcctttggagccacagaaccagctcaagtacatgccaatgttgtttaagaaacagttatgatcctaaactttttggataatcttttatatttctgacctttgaatttaatcattgttcttagattaaaataaaatatgctattgaaacta

SEQ ID NO: 26 - DNA, 2397 bp, Homo sapiens
cctggaccctggggcgtgaggagggcgcggtgcgtcccgtggttgtgcttggaagccccccgagggtgcgcgcgcgtgggtatgagtgcgtgcgtgtgcctgggtgtgcgtgtgtgtaagtgtgcacgtgtgtgtgtgagagtgcgcgcggggaaggaggcacagagacagcccggacaggccactgcgcagccctggtggcccccgctccacctctcgctccgcagacccgcgccagggaggcctctgggccgcagcgggcaccggagcggagcgggcgcggcagcgggcgctgggaggtggggctgggggaggagagggggagggagagaggcgggcgggaggggaggatccgggaagctccggggtatttgacaggagcgagggcggacgcaaagaacgcggaggacctctgggtgcctgcaggggagctgctccagccgggccgccgggagcggtggggagagcatcgcggagccgcccctccacgcgcccgcccagccgcgctcgcccactgggctctcccggctgcagtgccagggcgcaggacgcggccgatctcccgctcccgccacctccgccaccatgctgctcccccagctctgctggctgccgctgctcgctgggctgctcccgccggtgcccgctcagaagttctcggcgctcacgtttttgagagtggatcaagataaagacaaggattgtagcttggactgtgcgggttcgccccagaaacctctctgcgcatctgacggaaggaccttcctttcccgttgtgaatttcaacgtgccaagtgcaaagatccccagctagagattgcatatcgaggaaactgcaaagacgtgtccaggtgtgtggccgaaaggaagtatacccaggagcaagcccggaaggagtttcagcaagtgttcattcctgagtgcaatgacgacggcacctacagtcaggtccagtgtcacagctacacgggatactgctggtgcgtcacgcccaacgggaggcccatcagcggcactgccgtggcccacaagacgccccggtgcccgggttccgtaaatgaaaagttaccccaacgcgaaggcacaggaaaaacagatgatgccgcagctccagcgttggagactcagcctcaaggagatgaagaagatattgcatcacgttaccctaccctttggactgaacaggttaaaagtcggcagaacaaaaccaataagaattcagtgtcatcctgtgaccaagagcaccagtctgccctggaggaagccaagcagcccaagaacgacaatgtggtgatccctgagtgtgcgcacggcggcctctacaagccagtgcagtgccacccctccacggggtactgctggtgcgtcctggtggacacggggcgccccattcccggcacatccacaaggtacgagcagccgaaatgtgacaacacggccagggcccacccagccaaagcccgggacctgtacaagggccgccagctacaaggttgtccgggtgccaaaaagcatgagtttctgaccagcgttctggacgcgctgtccacggacatggtccacgccgcctccgacccctcctcctcgtcaggcaggctctcagaacccgaccccagccataccctagaggagcgggtggtgcactggtacttcaaactactggataaaaactccagtggagacatcggcaaaaaggaaatcaaacccttcaagaggttccttcgcaaaaaatcaaagcccaaaaaatgtgtgaagaagtttgttgaatactgtgacgtgaataatgacaaatccatctccgtacaagaactgatgggctgcctgggcgtggcgaaagaggacggcaaagcggacaccaagaaacgccacacccccagaggtcatgctgaaagtacgtctaatagacaggatgcaatggtggtgtcctccagacccaaagccacaacccatcgcaagtcaagaacactttccagaagataaacatgagtgggttcatgtctctctccttcaaagccaggacaaaatccccacttctttgctgccgcgagtcaatttgtgatttattttgtctgcacctgtttgatgccaggtcgacatttcctaaggcaagcccctgtatttgttgtggatttaagtggaggcggccagcacacaccttggatgtaatttaaaaccatttcctgaggaaagatgtgtgatatgctttcctttgtttagcaaatgtttatggttttaactttaaatctcaccgcaaatcacttacacttgaaaacagggctggtctgaaagtaattaccctccctgagtgccaagacctccagaagttgttttcattcccgaatggcaatcactgtactcatgcgctccacgcatcttaaataaactcagttcaaagca

SEQ ID NO: 27 - DNA, 2206 bp, Homo sapiens
cctggaccctggggcgtgaggagggcgcggtgcgtcccgtggttgtgcttggaagccccccgagggtgcgcgcgcgtgggtatgagtgcgtgcgtgtgcctgggtgtgcgtgtgtgtaagtgtgcacgtgtgtgtgtgagagtgcgcgcggggaaggaggcacagagacagcccggacaggccactgcgcagccctggtggcccccgctccacctctcgctccgcagacccgcgccagggaggcctctgggccgcagcgggcaccggagcggagcgggcgcggcagcgggcgctgggaggtggggctgggggaggagagggggagggagagaggcgggcgggaggggaggatccgggaagctccggggtatttgacaggagcgagggcggacgcaaagaacgcggaggacctctgggtgcctgcaggggagctgctccagccgggccgccgggagcggtggggagagcatcgcggagccgcccctccacgcgcccgcccagccgcgctcgcccactgggctctcccggctgcagtgccagggcgcaggacgcggccgatctcccgctcccgccacctccgccaccatgctgctcccccagctctgctggctgccgctgctcgctgggctgctcccgccggtgcccgctcagaagttctcggcgctcacgtttttgagagtggatcaagataaagacaaggattgtagcttggactgtgcgggttcgccccagaaacctctctgcgcatctgacggaaggaccttcctttcccgttgtgaatttcaacgtgccaagtgcaaagatccccagctagagattgcatatcgaggaaactgcaaagacgtgtccaggtgtgtggccgaaaggaagtatacccaggagcaagcccggaaggagtttcagcaagtgttcattcctgagtgcaatgacgacggcacctacagtcaggtccagtgtcacagctacacgggatactgctggtgcgtcacgcccaacgggaggcccatcagcggcactgccgtggcccacaagacgccccggtgcccgggttccgtaaatgaaaagttaccccaacgcgaaggcacaggaaaaacagatgatgccgcagctccagcgttggagactcagcctcaaggagatgaagaagatattgcatcacgttaccctaccctttggactgaacaggttaaaagtcggcagaacaaaaccaataagaattcagtgtcatcctgtgaccaagagcaccagtctgccctggaggaagccaagcagcccaagaacgacaatgtggtgatccctgagtgtgcgcacggcggcctctacaagccagtgcagtgccacccctccacggggtactgctggtgcgtcctggtggacacggggcgccccattcccggcacatccacaaggtacgagcagccgaaatgtgacaacacggccagggcccacccagccaaagcccgggacctgtacaagggccgccagctacaaggttgtccgggtgccaaaaagcatgagtttctgaccagcgttctggacgcgctgtccacggacatggtccacgccgcctccgacccctcctcctcgtcaggcaggctctcagaacccgaccccagccataccctagaggagcgggtggtgcactggtacttcaaactactggataaaaactccagtggagacatcggcaaaaaggaaatcaaacccttcaagaggttccttcgcaaaaaatcaaagcccaaaaaatgtgtgaagaagtttgttgaatactgtgacgtgaataatgacaaatccatctccgtacaagaactgatgggctgcctgggcgtggcgaaagaggacggcaaagcggacaccaagaaacgccacacccccagaggtcatgctgaaagtacgtctaatagacagctactgtggttgagaggaaaggtgtctttttattgcttctagagacgttgaaagtgtgacctgagcacctcataatcatgtgaaaaagacactcaaaaactaccatttgaatggatggatgaaaataacctccgtatattctacgaagatgtttaataataaataggtttcgttataagagaatgtgtgtcacttcgtctcttccctcacccccgagacttagtgacagttatttttgacttttccaactatactatttgcctagaaaatgtgtctattaaatagcgtattgagaaat

SEQ ID NO: 28 - DNA, 1292 bp, Homo sapiens
gtttcctgcttatgcaatagtagctgggagaggccgaaagaattctggtggggccacacccactggtgaaagaataaatagtgaggtttggcattggccatcagagtcactcctgccttcaccatgaagtccagcggcctcttccccttcctggtgctgcttgccctgggaactctggcaccttgggctgtggaaggctctggaaagtccttcaaagctggagtctgtcctcctaagaaatctgcccagtgccttagatacaagaaacctgagtgccagagtgactggcagtgtccagggaagaagagatgttgtcctgacacttgtggcatcaaatgcctggatcctgttgacaccccaaacccaacaaggaggaagcctgggaagtgcccagtgacttatggccaatgtttgatgcttaacccccccaatttctgtgagatggatggccagtgcaagcgtgacttgaagtgttgcatgggcatgtgtgggaaatcctgcgtttcccctgtgaaaggtaagcaggggatgagggcacactgagctccctccagccctctcagcctcaaccctctggaggcccaggcatatgggcagggggactcctgaaccctactccaagcacagcctctgtctgactcccttgtccttcaagagaactgttctccaggtctcagggccaggatttccataggatcgcctgtggctttgattctattctagtgtctctgggtgggggtcctgggcaagtgtctttctgagtctcagtttctttatcggtaaaatgtacataatgagattgaaagtgctctgcaaagcactatgtgcactaagaatttattattcaggttgtttccatcatgttttctgaggtgaaatcacaaaggatcagtggagtttgaggattatctagttcaatgctttgagtttagagttttacggtgaaaatgagacttgtctcctgacactaagtctctctcaactatagcgctatcttgctattttctctatctcagaaggatccttgggcaggaggaaggatgtggatatgatttggctggtttctatgctgaagctcttatctgattttctctcacagcttgattcctgccatatggaggaggctctggagtcctgctctgtgtggtccaggtcctttccaccctgagacttggctccaccactgatatcctcctttggggaaaggcttggcacacagcaggctttcaagaagtgccagttgatcaatgaataaataaacgagcctatttctctttgcaaaacctgcttct

SEQ ID NO: 29 - DNA, 886 bp, Homo sapiens
gtttcctgcttatgcaatagtagctgggagaggccgaaagaattctggtggggccacacccactggtgaaagaataaatagtgaggtttggcattggccatcagagtcactcctgccttcaccatgaagtccagcggcctcttccccttcctggtgctgcttgccctgggaactctggcaccttgggctgtggaaggctctggaaagtccttcaaagctggagtctgtcctcctaagaaatctgcccagtgccttagatacaagaaacctgagtgccagagtgactggcagtgtccagggaagaagagatgttgtcctgacacttgtggcatcaaatgcctggatcctgttgacaccccaaacccaacaaggaggaagcctgggaagtgcccagtgacttatggccaatgtttgatgcttaacccccccaatttctgtgagatggatggccagtgcaagcgtgacttgaagtgttgcatgggcatgtgtgggaaatcctgcgtttcccctgtgaaaggtgaaaagagacatcacaagcaattgagggaccaggaagtggatcctctagagatgaggaggcattctgctggatgacttttaaaaatgttttctccagagtcatctctctcattaacaatgttttttgtcttagaaatttcttgttgatttttaaacttacatgatttcttgttttggtatgaatacaggctgcttcagtccttcaataagcccatcacactttttcaccatgtcatctatcagcactttttctgcagtgttacgaacatcagcttcatcactgtcagcctgcgttttgcctgcaacccatcaaatgaggtcaggagaggagttttccacttttggcttcatgttggtgctcaaaact

SEQ ID NO: 30 - DNA, 696 bp, Homo sapiens
gtttcctgcttatgcaatagtagctgggagaggccgaaagaattctggtggggccacacccactggtgaaagaataaatagtgaggtttggcattggccatcagagtcactcctgccttcaccatgaagtccagcggcctcttccccttcctggtgctgcttgccctgggaactctggcaccttgggctgtggaaggctctggaaagtccttcaaagctggagtctgtcctcctaagaaatctgcccagtgccttagatacaagaaacctgagtgccagagtgactggcagtgtccagggaagaagagatgttgtcctgacacttgtggcatcaaatgcctggatcctgttgacaccccaaacccaacaaggaggaagcctgggaagtgcccagtgacttatggccaatgtttgatgcttaacccccccaatttctgtgagatggatggccagtgcaagcgtgacttgaagtgttgcatgggcatgtgtgggaaatcctgcgtttcccctgtgaaaggctgcttcagtccttcaataagcccatcacactttttcaccatgtcatctatcagcactttttctgcagtgttacgaacatcagcttcatcactgtcagcctgcgttttgcctgcaacccatcaaatgaggtcaggagaggagttttccacttttggcttcatgttggtgctcaaaact

SEQ ID NO: 31 - DNA, 706 bp, Homo sapiens
gtttcctgcttatgcaatagtagctgggagaggccgaaagaattctggtggggccacacccactggtgaaagaataaatagtgaggtttggcattggccatcagagtcactcctgccttcaccatgaagtccagcggcctcttccccttcctggtgctgcttgccctgggaactctggcaccttgggctgtggaaggctctggaaagtccttcaaagctggagtctgtcctcctaagaaatctgcccagtgccttagatacaagaaacctgagtgccagagtgactggcagtgtccagggaagaagagatgttgtcctgacacttgtggcatcaaatgcctggatcctgttgacaccccaaacccaagaggaagcctgggaagtgcccagtgacttatggccaatgtttgatgcttaacccccccaatttctgtgagatggatggccagtgcaagcgtgacttgaagtgttgcatgggcatgtgtgggaaatcctgcgtttcccctgtgaaagcttgattcctgccatatggaggaggctctggagtcctgctctgtgtggtccaggtcctttccaccctgagacttggctccaccactgatatcctcctttggggaaaggcttggcacacagcaggctttcaagaagtgccagttgatcaatgaataaataaacgagcctatttctctttgcaaaacctgcttct

SEQ ID NO: 32 - DNA, 560 bp, Homo sapiens
gtttcctgcttatgcaatagtagctgggagaggccgaaagaattctggtggggccacacccactggtgaaagaataaatagtgaggtttggcattggccatcagagtcactcctgccttcaccatgaagtccagcggcctcttccccttcctggtgctgcttgccctgggaactctggcaccttgggctgtggaaggctctggaaagtccttcaaagctggagtctgtcctcctaagaaatctgcccagtgccttagatacaagaaacctgagtgccagagtgactggcagtgtccagggaagaagagatgttgtcctgacacttgtggcatcaaatgcctggatcctgttgacaccccaaacccaacttgattcctgccatatggaggaggctctggagtcctgctctgtgtggtccaggtcctttccaccctgagacttggctccaccactgatatcctcctttggggaaaggcttggcacacagcaggctttcaagaagtgccagttgatcaatgaataaataaacgagcctatttctctttgcaaaacctgcttct

SEQ ID NO: 33 - DNA, 6951 bp, Homo sapiens
cggagggagtgagagccagaggctgctgctgccgtttgcaagaactgcaggggaggaggacgctgccacccacagcctctagagctcattgcagctgggacagcccggagtgtggttagcagctcggcaagcgctgcccaggtcctggggtggtggcagccagcgggagcaggaaaggaagcatgttcccaggctgcccacgcctctgggtcctggtggtcttgggcaccagctgggtaggctgggggagccaagggacagaagcggcacagctaaggcagttctacgtggctgctcagggcatcagttggagctaccgacctgagcccacaaactcaagtttgaatctttctgtaacttcctttaagaaaattgtctacagagagtatgaaccatattttaagaaagaaaaaccacaatctaccatttcaggacttcttgggcctactttatatgctgaagtcggagacatcataaaagttcactttaaaaataaggcagataagcccttgagcatccatcctcaaggaattaggtacagtaaattatcagaaggtgcttcttaccttgaccacacattccctgcggagaagatggacgacgctgtggctccaggccgagaatacacctatgaatggagtatcagtgaggacagtggacccacccatgatgaccctccatgcctcacacacatctattactcccatgaaaatctgatcgaggatttcaactcggggctgattgggcccctgcttatctgtaaaaaagggaccctaactgagggtgggacacagaagacgtttgacaagcaaatcgtgctactatttgctgtgtttgatgaaagcaagagctggagccagtcatcatccctaatgtacacagtcaatggatatgtgaatgggacaatgccagatataacagtttgtgcccatgaccacatcagctggcatctgctgggaatgagctcggggccagaattattctccattcatttcaacggccaggtcctggagcagaaccatcataaggtctcagccatcacccttgtcagtgctacatccactaccgcaaatatgactgtgggcccagagggaaagtggatcatatcttctctcaccccaaaacatttgcaagctgggatgcaggcttacattgacattaaaaactgcccaaagaaaaccaggaatcttaagaaaataactcgtgagcagaggcggcacatgaagaggtgggaatacttcattgctgcagaggaagtcatttgggactatgcacctgtaataccagcgaatatggacaaaaaatacaggtctcagcatttggataatttctcaaaccaaattggaaaacattataagaaagttatgtacacacagtacgaagatgagtccttcaccaaacatacagtgaatcccaatatgaaagaagatgggattttgggtcctattatcagagcccaggtcagagacacactcaaaatcgtgttcaaaaatatggccagccgcccctatagcatttaccctcatggagtgaccttctcgccttatgaagatgaagtcaactcttctttcacctcaggcaggaacaacaccatgatcagagcagttcaaccaggggaaacctatacttataagtggaacatcttagagtttgatgaacccacagaaaatgatgcccagtgcttaacaagaccatactacagtgacgtggacatcatgagagacatcgcctctgggctaataggactacttctaatctgtaagagcagatccctggacaggcgaggaatacagagggcagcagacatcgaacagcaggctgtgtttgctgtgtttgatgagaacaaaagctggtaccttgaggacaacatcaacaagttttgtgaaaatcctgatgaggtgaaacgtgatgaccccaagttttatgaatcaaacatcatgagcactatcaatggctatgtgcctgagagcataactactcttggattctgctttgatgacactgtccagtggcacttctgtagtgtggggacccagaatgaaattttgaccatccacttcactgggcactcattcatctatggaaagaggcatgaggacaccttgaccctcttccccatgcgtggagaatctgtgacggtcacaatggataatgttggaacttggatgttaacttccatgaattctagtccaagaagcaaaaagctgaggctgaaattcagggatgttaaatgtatcccagatgatgatgaagactcatatgagatttttgaacctccagaatctacagtcatggctacacggaaaatgcatgatcgtttagaacctgaagatgaagagagtgatgctgactatgattaccagaacagactggctgcagcattaggaattaggtcattccgaaactcatcattgaaccaggaagaagaagagttcaatcttactgccctagctctggagaatggcactgaattcgtttcttcgaacacagatataattgttggttcaaattattcttccccaagtaatattagtaagttcactgtcaataaccttgcagaacctcagaaagccccttctcaccaacaagccaccacagctggttccccactgagacacctcattggcaagaactcagttctcaattcttccacagcagagcattccagcccatattctgaagaccctatagaggatcctctacagccagatgtcacagggatacgtctactttcacttggtgctggagaattcagaagtcaagaacatgctaagcgtaagggacccaaggtagaaagagatcaagcagcaaagcacaggttctcctggatgaaattactagcacataaagttgggagacacctaagccaagacactggttctccttccggaatgaggccctgggaggaccttcctagccaagacactggttctccttccagaatgaggccctggaaggaccctcctagtgatctgttactcttaaaacaaagtaactcatctaagattttggttgggagatggcatttggcttctgagaaaggtagctatgaaataatccaagatactgatgaagacacagctgttaacaattggctgatcagcccccagaatgcctcacgtgcttggggagaaagcacccctcttgccaacaagcctggaaagcagagtggccacccaaagtttcctagagttagacataaatctctacaagtaagacaggatggaggaaagagtagactgaagaaaagccagtttctcattaagacacgaaaaaagaaaaaagagaagcacacacaccatgctcctttatctccgaggacctttcaccctctaagaagtgaagcctacaacacattttcagaaagaagacttaagcattcgttggtgcttcataaatccaatgaaacatctcttcccacagacctcaatcagacattgccctctatggattttggctggatagcctcacttcctgaccataatcagaattcctcaaatgacactggtcaggcaagctgtcctccaggtctttatcagacagtgcccccagaggaacactatcaaacattccccattcaagaccctgatcaaatgcactctacttcagaccccagtcacagatcctcttctccagagctcagtgaaatgcttgagtatgaccgaagtcacaagtccttccccacagatataagtcaaatgtccccttcctcagaacatgaagtctggcagacagtcatctctccagacctcagccaggtgaccctctctccagaactcagccagacaaacctctctccagacctcagccacacgactctctctccagaactcattcagagaaacctttccccagccctcggtcagatgcccatttctccagacctcagccatacaaccctttctccagacctcagccatacaaccctttctttagacctcagccagacaaacctctctccagaactcagtcagacaaacctttctccagccctcggtcagatgcccctttctccagacctcagccatacaaccctttctctagacttcagccagacaaacctctctccagaactcagccatatgactctctctccagaactcagtcagacaaacctttccccagccctcggtcagatgcccatttctccagacctcagccatacaaccctttctctagacttcagccagacaaacctctctccagaactcagtcaaacaaacctttccccagccctcggtcagatgcccctttctccagaccccagccatacaaccctttctctagacctcagccagacaaacctctctccagaactcagtcagacaaacctttccccagacctcagtgagatgcccctctttgcagatctcagtcaaattccccttaccccagacctcgaccagatgacactttctccagaccttggtgagacagatctttccccaaactttggtcagatgtccctttccccagacctcagccaggtgactctctctccagacatcagtgacaccacccttctcccggatctcagccagatatcacctcctccagaccttgatcagatattctacccttctgaatctagtcagtcattgcttcttcaagaatttaatgagtcttttccttatccagaccttggtcagatgccatctccttcatctcctactctcaatgatacttttctatcaaaggaatttaatccactggttatagtgggcctcagtaaagatggtacagattacattgagatcattccaaaggaagaggtccagagcagtgaagatgactatgctgaaattgattatgtgccctatgatgacccctacaaaactgatgttaggacaaacatcaactcctccagagatcctgacaacattgcagcatggtacctccgcagcaacaatggaaacagaagaaattattacattgctgctgaagaaatatcctgggattattcagaatttgtacaaagggaaacagatattgaagactctgatgatattccagaagataccacatataagaaagggagtatgaagagcatctcggaattcttggtcctattatcagagctgaagtggatgatgttatccaagttcgttttaaaaatttagcatccagaccgtattctctacatgcccatggactttcctatgaaaaatcatcagagggaaagacttatgaagatgactctcctgaatggtttaaggaagataatgctgttcagccaaatagcagttatacctacgtatggcatgccactgagcgatcagggccagaaagtcctggctctgcctgtcgggcttgggcctactactcagctgtgaacccagaaaaagatattcactcaggcttgataggtcccctcctaatctgccaaaaaggaatactacataaggacagcaacatgcctgtggacatgagagaatttgtcttactatttatgacctttgatgaaaagaagagctggtactatgaaaagaagtcccgaagttcttggagactcacatcctcagaaatgaaaaaatcccatgagtttcacgccattaatgggatgatctacagcttgcctggcctgaaaatgtatgagcaagagtgggtgaggttacacctgctgaacataggcggctcccaagacattcacgtggttcactttcacggccagaccttgctggaaaatggcaataaacagcaccagttaggggtctggccccttctgcctggttcatttaaaactcttgaaatgaaggcatcaaaacctggctggtggctcctaaacacagaggttggagaaaaccagagagcagggatgcaaacgccatttcttatcatggacagagactgtaggatgccaatgggactaagcactggtatcatatctgattcacagatcaaggcttcagagtttctgggttactgggagcccagattagcaagattaaacaatggtggatcttataatgcttggagtgtagaaaaacttgcagcagaatttgcctctaaaccttggatccaggtggacatgcaaaaggaagtcataatcacagggatccagacccaaggtgccaaacactacctgaagtcctgctataccacagagttctatgtagcttacagttccaaccagatcaactggcagatcttcaaagggaacagcacaaggaatgtgatgtattttaatggcaattcagatgcctctacaataaaagagaatcagtttgacccacctattgtggctagatatattaggatctctccaactcgagcctataacagacctacccttcgattggaactgcaaggttgtgaggtaaatggatgttccacacccctgggtatggaaaatggaaagatagaaaacaagcaaatcacagcttcttcgtttaagaaatcttggtggggagattactgggaacccttccgtgcccgtctgaatgcccagggacgtgtgaatgcctggcaagccaaggcaaacaacaataagcagtggctagaaattgatctactcaagatcaagaagataacggcaattataacacagggctgcaagtctctgtcctctgaaatgtatgtaaagagctataccatccactacagtgagcagggagtggaatggaaaccatacaggctgaaatcctccatggtggacaagatttttgaaggaaatactaataccaaaggacatgtgaagaactttttcaaccccccaatcatttccaggtttatccgtgtcattcctaaaacatggaatcaaagtattgcacttcgcctggaactctttggctgtgatatttactagaattgaacattcaaaaacccctggaagagactctttaagacctcaaaccatttagaatgggcaatgtattttacgctgtgttaaatgttaacagttttccactatttctctttcttttctattagtgaataaaattttatacaaga

SEQ ID NO: 34 - DNA, 6996 bp, Homo sapiens
cggagggagtgagagccagaggctgctgctgccgtttgcaagaactgcaggggaggaggacgctgccacccacagcctctagagctcattgcagctgggacagcccggagtgtggttagcagctcggcaagcgctgcccaggtcctggggtggtggcagccagcgggagcaggaaaggaagcatgttcccaggctgcccacgcctctgggtcctggtggtcttgggcaccagctgggtaggctgggggagccaagggacagaagcggcacagctaaggcagttctacgtggctgctcagggcatcagttggagctaccgacctgagcccacaaactcaagtttgaatctttctgtaacttcctttaagaaaattgtctacagagagtatgaaccatattttaagaaagaaaaaccacaatctaccatttcaggacttcttgggcctactttatatgctgaagtcggagacatcataaaagttcactttaaaaataaggcagataagcccttgagcatccatcctcaaggaattaggtacagtaaattatcagaaggtgcttcttaccttgaccacacattccctgcggagaagatggacgacgctgtggctccaggccgagaatacacctatgaatggagtatcagtgaggacagtggacccacccatgatgaccctccatgcctcacacacatctattactcccatgaaaatctgatcgaggatttcaactcggggctgattgggcccctgcttatctgtaaaaaagggaccctaactgagggtgggacacagaagacgtttgacaagcaaatcgtgctactatttgctgtgtttgatgaaagcaagagctggagccagtcatcatccctaatgtacacagtcaatggatatgtgaatgggacaatgccagatataacagtttgtgcccatgaccacatcagctggcatctgctgggaatgagctcggggccagaattattctccattcatttcaacggccaggtcctggagcagaaccatcataaggtctcagccatcacccttgtcagtgctacatccactaccgcaaatatgactgtgggcccagagggaaagtggatcatatcttctctcaccccaaaacatttgcaagctgggatgcaggcttacattgacattaaaaactgcccaaagaaaaccaggaatcttaagaaaataactcgtgagcagaggcggcacatgaagaggtgggaatacttcattgctgcagaggaagtcatttgggactatgcacctgtaataccagcgaatatggacaaaaaatacaggtctcagcatttggataatttctcaaaccaaattggaaaacattataagaaagttatgtacacacagtacgaagatgagtccttcaccaaacatacagtgaatcccaatatgaaagaagatgggattttgggtcctattatcagagcccaggtcagagacacactcaaaatcgtgttcaaaaatatggccagccgcccctatagcatttaccctcatggagtgaccttctcgccttatgaagatgaagtcaactcttctttcacctcaggcaggaacaacaccatgatcagagcagttcaaccaggggaaacctatacttataagtggaacatcttagagtttgatgaacccacagaaaatgatgcccagtgcttaacaagaccatactacagtgacgtggacatcatgagagacatcgcctctgggctaataggactacttctaatctgtaagagcagatccctggacaggcgaggaatacagagggcagcagacatcgaacagcaggctgtgtttgctgtgtttgatgagaacaaaagctggtaccttgaggacaacatcaacaagttttgtgaaaatcctgatgaggtgaaacgtgatgaccccaagttttatgaatcaaacatcatgagcactatcaatggctatgtgcctgagagcataactactcttggattctgctttgatgacactgtccagtggcacttctgtagtgtggggacccagaatgaaattttgaccatccacttcactgggcactcattcatctatggaaagaggcatgaggacaccttgaccctcttccccatgcgtggagaatctgtgacggtcacaatggataatgttggaacttggatgttaacttccatgaattctagtccaagaagcaaaaagctgaggctgaaattcagggatgttaaatgtatcccagatgatgatgaagactcatatgagatttttgaacctccagaatctacagtcatggctacacggaaaatgcatgatcgtttagaacctgaagatgaagagagtgatgctgactatgattaccagaacagactggctgcagcattaggaattaggtcattccgaaactcatcattgaaccaggaagaagaagagttcaatcttactgccctagctctggagaatggcactgaattcgtttcttcgaacacagatataattgttggttcaaattattcttccccaagtaatattagtaagttcactgtcaataaccttgcagaacctcagaaagccccttctcaccaacaagccaccacagctggttccccactgagacacctcattggcaagaactcagttctcaattcttccacagcagagcattccagcccatattctgaagaccctatagaggatcctctacagccagatgtcacagggatacgtctactttcacttggtgctggagaattcagaagtcaagaacatgctaagcgtaagggacccaaggtagaaagagatcaagcagcaaagcacaggttctcctggatgaaattactagcacataaagttgggagacacctaagccaagacactggttctccttccggaatgaggccctgggaggaccttcctagccaagacactggttctccttccagaatgaggccctggaaggaccctcctagtgatctgttactcttaaaacaaagtaactcatctaagattttggttgggagatggcatttggcttctgagaaaggtagctatgaaataatccaagatactgatgaagacacagctgttaacaattggctgatcagcccccagaatgcctcacgtgcttggggagaaagcacccctcttgccaacaagcctggaaagcagagtggccacccaaagtttcctagagttagacataaatctctacaagtaagacaggatggaggaaagagtagactgaagaaaagccagtttctcattaagacacgaaaaaagaaaaaagagaagcacacacaccatgctcctttatctccgaggacctttcaccctctaagaagtgaagcctacaacacattttcagaaagaagacttaagcattcgttggtgcttcataaatccaatgaaacatctcttcccacagacctcaatcagacattgccctctatggattttggctggatagcctcacttcctgaccataatcagaattcctcaaatgacactggtcaggcaagctgtcctccaggtctttatcagacagtgcccccagaggaacactatcaaacattccccattcaagaccctgatcaaatgcactctacttcagaccccagtcacagatcctcttctccagagctcagtgaaatgcttgagtatgaccgaagtcacaagtccttccccacagatataagtcaaatgtccccttcctcagaacatgaagtctggcagacagtcatctctccagacctcagccaggtgaccctctctccagaactcagccagacaaacctctctccagacctcagccacacgactctctctccagaactcattcagagaaacctttccccagccctcggtcagatgcccatttctccagacctcagccatacaaccctttctccagacctcagccatacaaccctttctttagacctcagccagacaaacctctctccagaactcagtcagacaaacctttctccagccctcggtcagatgcccctttctccagacctcagccatacaaccctttctctagacttcagccagacaaacctctctccagaactcagccatatgactctctctccagaactcagtcagacaaacctttccccagccctcggtcagatgcccatttctccagacctcagccatacaaccctttctctagacttcagccagacaaacctctctccagaactcagtcaaacaaacctttccccagccctcggtcagatgcccctttctccagaccccagccatacaaccctttctctagacctcagccagacaaacctctctccagaactcagtcagacaaacctttccccagacctcagtgagatgcccctctttgcagatctcagtcaaattccccttaccccagacctcgaccagatgacactttctccagaccttggtgagacagatctttccccaaactttggtcagatgtccctttccccagacctcagccaggtgactctctctccagacatcagtgacaccacccttctcccggatctcagccagatatcacctcctccagaccttgatcagatattctacccttctgaatctagtcagtcattgcttcttcaagaatttaatgagtcttttccttatccagaccttggtcagatgccatctccttcatctcctactctcaatgatacttttctatcaaaggaatttaatccactggttatagtgggcctcagtaaagatggtacagattacattgagatcattccaaaggaagaggtccagagcagtgaagatgactatgctgaaattgattatgtgccctatgatgacccctacaaaactgatgttaggacaaacatcaactcctccagagatcctgacaacattgcagcatggtacctccgcagcaacaatggaaacagaagaaattattacattgctgctgaagaaatatcctgggattattcagaatttgtacaaagggaaacagatattgaagactctgatgatattccagaagataccacatataagaaagtagtttttcgaaagtacctcgacagcacttttaccaaacgtgatcctcgaggggagtatgaagagcatctcggaattcttggtcctattatcagagctgaagtggatgatgttatccaagttcgttttaaaaatttagcatccagaccgtattctctacatgcccatggactttcctatgaaaaatcatcagagggaaagacttatgaagatgactctcctgaatggtttaaggaagataatgctgttcagccaaatagcagttatacctacgtatggcatgccactgagcgatcagggccagaaagtcctggctctgcctgtcgggcttgggcctactactcagctgtgaacccagaaaaagatattcactcaggcttgataggtcccctcctaatctgccaaaaaggaatactacataaggacagcaacatgcctgtggacatgagagaatttgtcttactatttatgacctttgatgaaaagaagagctggtactatgaaaagaagtcccgaagttcttggagactcacatcctcagaaatgaaaaaatcccatgagtttcacgccattaatgggatgatctacagcttgcctggcctgaaaatgtatgagcaagagtgggtgaggttacacctgctgaacataggcggctcccaagacattcacgtggttcactttcacggccagaccttgctggaaaatggcaataaacagcaccagttaggggtctggccccttctgcctggttcatttaaaactcttgaaatgaaggcatcaaaacctggctggtggctcctaaacacagaggttggagaaaaccagagagcagggatgcaaacgccatttcttatcatggacagagactgtaggatgccaatgggactaagcactggtatcatatctgattcacagatcaaggcttcagagtttctgggttactgggagcccagattagcaagattaaacaatggtggatcttataatgcttggagtgtagaaaaacttgcagcagaatttgcctctaaaccttggatccaggtggacatgcaaaaggaagtcataatcacagggatccagacccaaggtgccaaacactacctgaagtcctgctataccacagagttctatgtagcttacagttccaaccagatcaactggcagatcttcaaagggaacagcacaaggaatgtgatgtattttaatggcaattcagatgcctctacaataaaagagaatcagtttgacccacctattgtggctagatatattaggatctctccaactcgagcctataacagacctacccttcgattggaactgcaaggttgtgaggatgttccacacccctgggtatggaaaatggaaagatagaaaacaagcaaatcacagcttcttcgtttaagaaatcttggtggggagattactgggaacccttccgtgcccgtctgaatgcccagggacgtgtgaatgcctggcaagccaaggcaaacaacaataagcagtggctagaaattgatctactcaagatcaagaagataacggcaattataacacagggctgcaagtctctgtcctctgaaatgtatgtaaagagctataccatccactacagtgagcagggagtggaatggaaaccatacaggctgaaatcctccatggtggacaagatttttgaaggaaatactaataccaaaggacatgtgaagaactttttcaaccccccaatcatttccaggtttatccgtgtcattcctaaaacatggaatcaaagtattgcacttcgcctggaactctttggctgtgatatttactagaattgaacattcaaaaacccctggaagagactctttaagacctcaaaccatttagaatgggcaatgtattttacgctgtgttaaatgttaacagttttccactatttctctttcttttctattagtgaataaaattttatacaaga

SEQ ID NO: 35 - DNA, 2097 bp, Homo sapiens
cggagggagtgagagccagaggctgctgctgccgtttgcaagaactgcaggggaggaggacgctgccacccacagcctctagagctcattgcagctgggacagcccggagtgtggttagcagctcggcaagcgctgcccaggtcctggggtggtggcagccagcgggagcaggaaaggaagcatgttcccaggctgcccacgcctctgggtcctggtggtcttgggcaccagctgggtaggctgggggagccaagggacagaagcggcacagctaaggcagttctacgtggctgctcagggcatcagttggagctaccgacctgagcccacaaactcaagtttgaatctttctgtaacttcctttaagaaaattgtctacagagagtatgaaccatattttaagaaagaaaaaccacaatctaccatttcaggacttcttgggcctactttatatgctgaagtcggagacatcataaaagttcactttaaaaataaggcagataagcccttgagcatccatcctcaaggaattaggtacagtaaattatcagaaggtgcttcttaccttgaccacacattccctgcggagaagatggacgacgctgtggctccaggccgagaatacacctatgaatggagtatcagtgaggacagtggacccacccatgatgaccctccatgcctcacacacatctattactcccatgaaaatctgatcgaggatttcaactcggggctgattgggcccctgcttatctgtaaaaaagggaccctaactgagggtgggacacagaagacgtttgacaagcaaatcgtgctactatttgctgtgtttgatgaaagcaagagctggagccagtcatcatccctaatgtacacagtcaatggatatgtgaatgggacaatgccagatataacagtttgtgcccatgaccacatcagctggcatctgctgggaatgagctcggggccagaattattctccattcatttcaacggccaggtcctggagcagaaccatcataaggtctcagccatcacccttgtcagtgctacatccactaccgcaaatatgactgtgggcccagagggaaagtggatcatatcttctctcaccccaaaacatttgcaagctgggatgcaggcttacattgacattaaaaactgcccaaagaaaaccaggaatcttaagaaaataactcgtgagcagaggcggcacatgaagaggtgggaatacttcattgctgcagaggaagtcatttgggactatgcacctgtaataccagcgaatatggacaaaaaatacaggtctcagcatttggataatttctcaaaccaaattggaaaacattataagaaagttatgtacacacagtacgaagatgagtccttcaccaaacatacagtgaatcccaatatgaaagaagatgggattttgggtcctattatcagagcccaggtcagagacacactcaaaatcgtgttcaaaaatatggccagccgcccctatagcatttaccctcatggagtgaccttctcgccttatgaagatgaagtcaactcttctttcacctcaggcaggaacaacaccatgatcagagcagttcaaccaggggaaacctatacttataagtggaacatcttagagtttgatgaacccacagaaaatgatgcccagtgcttaacaagaccatactacagtgacgtggacatcatgagagacatcgcctctgggctaataggactacttctaatctgtaagagcagatccctggacaggcgaggaatacagagggcagcagacatcgaacagcaggctgtgtttgctgtgtttgatgagaacaaaagctggtaccttgaggacaacatcaacaagttttgtgaaaatcctgatgaggtgaaacgtgatgaccccaagttttatgaatcaaacatcatgagcagtaagtcagagtactatttttgttcatcagtttttcattcctgtggttgaaatatgactgtgcctagagtcagagacatggattaaaatctactcgctaaggggcacctccaatcctcacttccagtccaaagacttggtgatgaaatccgtg

SEQ ID NO: 36 - DNA, 5100 bp, Homo sapiens
agcacacatgatcttaactgggtctcttctcctgaatccctggggaaagagaaagacgcctacagcacttttttccactgcccctctgtggtcagcctttggtgaggggaactggaagggccttctagatcacacatccaactccctcaattataaatgagggcactgtggaccagaggagccaagggctttctccagggtcacacagtggaccaatgtcagggaccaggagggtccagatccctcagttcccaagccctacatcctcacgtccagcatgcacgtgcaaggccagcatgcccagcctggaactggagacgccgatcagagggcctggcaggctgctgccggtgcccatctcacaggccccgagggctgataaggatgcccttgaaggtgattgatggtttgcaaagcacccacttattagtatttccactggacctctgaaaacagtgatggagatagagagattgcatgtaacttgggacttgggaggtggcctgaaatgactgtgacccagctgatttctctgaggacttaggaggaaatatctgaagttggactcttcttgactgggccaaaaccagatgcttccccggcttctttgcacatacttttccccgtgctttcttgttgaaataagcagcattgtggagtgagaggcatttggaatgtgactcctccgtttacttactcctccacctaggcagaatactttgcttctgtttcctttgtgtaaaatgggaagacgatagaacctccttggttaggactgtggtgaggtgtcagtgaattaatgcgaaatccacatagaaccatgcactatcacaagcgtttgccattatcattcatagtgttagcattcataagcggcatgattgtcccagcagccttgagaaagggtggggagagcactttaatccgtgcttcacagatgaggaaactgaggcacagagaaggtccccagccttcccaagaccccacagtaggtgagttgcagggttagtctgctgtgtcccagatctgtgttctttctgccatgctgcattgccactcagagaggaacaacctgatctagaaagtgaaattttttccagccgcagctgctgcggctacatttgtgaatcagctctgtaaatacaagtttaatacgcgttgttcctgctcagtgggcgttgatagcccagccctggaagagcctttaagaacaggccttaaatagacacaccagctccatgcttcagttttgggaggctgtaccccataaaggaagggtgcaagggcctgtgggctgacaggaattacagaccggcttccaggtggccccaccacctgtgctgggcccctgctgggctcacttgactgtccctgagcccatcactcacccttttggagcaatttttgaaacagaccgctaagtacccaggttattagctggtctcatccctaccatgccggggaacagcatttggatcaccgcagtagcagcccaaggagacacacaagtagctgctttctcggactgtattattttctgaaagtaagaaactttccctgggcagaactctttctagttcccatggggatgggcaggataggcgagaggccgagcccccacttccaggtctctgggcagggcggggttaggcagcagcgggtgtcactcacacagtgactttcacttgtgctttcagtgctcaggacatgggcacctgccggcttccttctagcccggttggacagctccggcagctggtttggggaggtaaaattataggagcgtgatgtcacccgggccactcagggcagagcctggctgctgggcagaagggcacttgggccgggctgcttcagccgagagggccattcggtgtcctgcccacagagagagaaacagtgagagaccaagagagcaaaccagagagatagggagggggaatgcaaggggtccctgggggactcaggagtcccagtggagaatgagaggcaggccccccgtggtggccggggccctggctgccagaggaccgggctggtgaggaggcgaggatgtggactttcgtcacccagctgttggtcacgctggtgctgctgagcttcttcctggtcagctgtcagaacgtgatgcacattgtcagggggtccctgtgctttgtgctaaagcacatccaccaggagctggacaaggagctgggggagagcgagggcctcagtgacgacgaggagaccatctccaccagggtggtccggcggcgggtcttcctgaaggggaatgagtttcagaatattccaggggagcaggtgacagaggagcaattcacggatgagcagggcaacattgtcaccaagaagatcattcgcaaggtggttcgacagatagacttgtccagcgccgatgccgcccaggagcacgaggaggtggagctgagagggagtggcctacagccggacctgatagagggcaggaagggggcgcagatagtgaagcgggccagcctgaaaagggggaaacagtgaccccgagccgctctccttggagtagcctctcgggaggatcacacctcgacacccaacccctgaaccccacacactctgccatgcacacaggaggagagctggacctgagggccaccgcagcggtgcacacattcctctgggctgacggcatgacctctgtaagggactcctgctagtcccctcttggcatgaatgactgactgtagacgcatgacctccaggcttcaatcctgcctcttgcaatgacagctgatctgtcggaaccaggacacaaaagcagcaagaagcggggagagagagggatagaaaacaagcgcaggagagcctgcgaacgcaaaagtgaatgagggctttttgtggctggggatgggttttggttttggggttttttttttaaattgttttgacttcgtacagggtactttttcccaacctcatctgtcagaaatccatgtgggcttcctggaaagaaaaaaaaaaaaaaagaaaactaggcatgaaatcagtttaacaccttaatcttaagccatgtcctcatctgcccaccctccccaacccacatacctccattccacttgtgacaccccctcgactccctggtgacgctcctcccagatcgctctacatgacattcaggacacacacacacacacacacacacacaccactcgcctccactgaatctacacacagattttactgtgacttctgaagctgtatagactctgctgtggataaattggaattttttatgttgtctctctctctgccaatttcaatacgaatcatcttccaatggaaaatcattaccttgaagagtgcattcggggttccttgtgttagggacttaagaatctgaggcgaggacccccaggcttacctgtaggactcaaagggagccaggaccccatctgaaagggtctcctctctcagttgggggacaggccggtggctgacccaggattgcaccagcatgtccatagagaagaggttttctatgtcttcaagcactatatcatagtccgtgttcaaagtgtaaactgtacagtaatcagccttgtgtatatgaaaaacaataaatactatgcaaaccaatagaaacatttagcagtacgtacagagcctgacagcgcagctcctgaggacttctgcggctgcaggagaaggagctgtggcctgtctttcagtgaaagaggaaggaaaggagtagggctagtgaatgtatctgccaggtcttagaagtcaggaccacccagggtctcccagagtgaacttggtgctctaagtccaggcagcctgcaggctggggaccctgggtgcaggtgccaggctcgaggctgttccctgtcctgcctcagtgcctcccctctgcccagcccctgtggcctcttggagaggcgagccagggggctccccggaccgcatggccggtgagagtagagtcggaggcggagagcctggacgcccagaggccggggccaggctctgggtcaaggcaggaaggagacagacagctggcagttcctcgcctcggtgccatcagggaggagccttaagttccactagagcctccggcccagggaggccagaatcagcacaatcccggccccgccctcgcggcgggcgcccccagggccaggagagagagacagggctggctcctctcgcccctggagccgcggtgtggacggcccggccccgtccgccccgccgctctgcgggagtgtcctcgggacacacttaaaccttccaagtagcacagaagccccctccacgtcagaggccccctggccgcggggcctgtgagcggagaggggccctgcttcccacacaaatccgccccggtgcacccccggccaggcaggccccggggcggcctaggcgccttgtcggccgggggtggggctgcttttgcttcctttagaggggcgggcagggagaggaagctctagctccgggcctgagtttccccgaggctgcgtcggaggagctgcagggcgagcccggacggctgccgtctccgccagaggccaccccggcccggcctccagggcgcagaggcgcccccctccatcctcccccatcccgggggccacggcaggggggccgcacagcgcggctgggaccgattcggtgacggcccaaggaagctgggcgcagggctcgcctctcccgcctcgatcctgcaccttcctctcccaggtcgctgctgcagccaacccagtagcccccttagcgcccccgcggaccccgcagctccagactccgctttggcacctctgctccggctggcatggctgcacgctccggctgctagtaggagccgttaggggaggagtttggggtctccacacgatgcctagagaatgctgcagtctgcacattagacgctttttagaagttttgaaattaccttgatttttttaattgttatgaaaatggatcttttcttgactctcccacatgctctgttatgggagagaatcccctaccctactctgatgtatagaccattctcccttcaccagccgaaccaatgtcaaaattaataaagaaatggactaatggcacagggctcta

SEQ ID NO: 37 - DNA, 5026 bp, Homo sapiens
agcacacatgatcttaactgggtctcttctcctgaatccctggggaaagagaaagacgcctacagcacttttttccactgcccctctgtggtcagcctttggtgaggggaactggaagggccttctagatcacacatccaactccctcaattataaatgagggcactgtggaccagaggagccaagggctttctccagggtcacacagtggaccaatgtcagggaccaggagggtccagatccctcagttcccaagccctacatcctcacgtccagcatgcacgtgcaaggccagcatgcccagcctggaactggagacgccgatcagagggcctggcaggctgctgccggtgcccatctcacaggccccgagggctgataaggatgcccttgaaggtgattgatggtttgcaaagcacccacttattagtatttccactggacctctgaaaacagtgatggagatagagagattgcatgtaacttgggacttgggaggtggcctgaaatgactgtgacccagctgatttctctgaggacttaggaggaaatatctgaagttggactcttcttgactgggccaaaaccagatgcttccccggcttctttgcacatacttttccccgtgctttcttgttgaaataagcagcattgtggagtgagaggcatttggaatgtgactcctccgtttacttactcctccacctaggcagaatactttgcttctgtttcctttgtgtaaaatgggaagacgatagaacctccttggttaggactgtggtgaggtgtcagtgaattaatgcgaaatccacatagaaccatgcactatcacaagcgtttgccattatcattcatagtgttagcattcataagcggcatgattgtcccagcagccttgagaaagggtggggagagcactttaatccgtgcttcacagatgaggaaactgaggcacagagaaggtccccagccttcccaagaccccacagtaggtgagttgcagggttagtctgctgtgtcccagatctgtgttctttctgccatgctgcattgccactcagagaggaacaacctgatctagaaagtgaaattttttccagccgcagctgctgcggctacatttgtgaatcagctctgtaaatacaagtttaatacgcgttgttcctgctcagtgggcgttgatagcccagccctggaagagcctttaagaacaggccttaaatagacacaccagctccatgcttcagttttgggaggctgtaccccataaaggaagggtgcaagggcctgtgggctgacaggaattacagaccggcttccaggtggccccaccacctgtgctgggcccctgctgggctcacttgactgtccctgagcccatcactcacccttttggagcaatttttgaaacagaccgctaagtacccaggttattagctggtctcatccctaccatgccggggaacagcatttggatcaccgcagtagcagcccaaggagacacacaagtagctgctttctcggactgtattattttctgaaagtaagaaactttccctgggcagaactctttctagttcccatggggatgggcaggataggcgagaggccgagcccccacttccaggtctctgggcagggcggggttaggcagcagcgggtgtcactcacacagtgactttcacttgtgctttcagtgctcaggacatgggcacctgccggcttccttctagcccggttggacagctccggcagctggtttggggaggtaaaattataggagcgtgatgtcacccgggccactcagggcagagcctggctgctgggcagaagggcacttgggccgggctgcttcagccgagagggccattcggtgtcctgcccacagagagagaaacagtgagagaccaagagagcaaaccagagagatagggagggggaatgcaaggggtccctgggggactcaggagtcccagtggagaatgagaggcaggccccccgtggtggccggggccctggctgccagaggaccgggctggtgaggaggcgaggatgtggactttcgtcacccagctgttggtcacgctggtgctgctgagcttcttcctggtcagctgtcagaacgtgatgcacattgtcagggggtccctgtgctttgtgctaaagcacatccaccaggagctggacaaggagctgggggagagcgagggcctcagtgacgacgaggagaccatctccaccagggtggtccggcggcgggtcttcctgaaggggaatgagtttcagaatattccaggggagcaggtgacagaggagcaattcacggatgagcagggcaacattgtcaccaagaagatcattcgcaaggtggttcgacagatagacttgtccagcgccgatgccgcccaggagcacgaggaggtgactgtagaggggcccctggaggatcccagtgagctggaggtcgatattgattactttatgaaacactccaaggatcacacctcgacacccaacccctgaaccccacacactctgccatgcacacaggaggagagctggacctgagggccaccgcagcggtgcacacattcctctgggctgacggcatgacctctgtaagggactcctgctagtcccctcttggcatgaatgactgactgtagacgcatgacctccaggcttcaatcctgcctcttgcaatgacagctgatctgtcggaaccaggacacaaaagcagcaagaagcggggagagagagggatagaaaacaagcgcaggagagcctgcgaacgcaaaagtgaatgagggctttttgtggctggggatgggttttggttttggggttttttttttaaattgttttgacttcgtacagggtactttttcccaacctcatctgtcagaaatccatgtgggcttcctggaaagaaaaaaaaaaaaaaagaaaactaggcatgaaatcagtttaacaccttaatcttaagccatgtcctcatctgcccaccctccccaacccacatacctccattccacttgtgacaccccctcgactccctggtgacgctcctcccagatcgctctacatgacattcaggacacacacacacacacacacacacacaccactcgcctccactgaatctacacacagattttactgtgacttctgaagctgtggataaattggaattttttatgttgtctctctctctgccaatttcaatacgaatcatcttccaatggaaaatcattaccttgaagagtgcattcggggttccttgtgttagggacttaagaatctgaggcgaggacccccaggcttacctgtaggactcaaagggagccaggaccccatctgaaagggtctcctctctcagttgggggacaggccggtggctgacccaggattgcaccagcatgtccatagagaagaggttttctatgtcttcaagcactatatcatagtccgtgttcaaagtgtaaactgtacagtaatcagccttgtgtatatgaaaaacaataaatactatgcaaaccaatagaaacatttagcagtacgtacagagcctgacagcgcagctcctgaggacttctgcggctgcaggagaaggagctgtggcctgtctttcagtgaaagaggaaggaaaggagtagggctagtgaatgtatctgccaggtcttagaagtcaggaccacccagggtctcccagagtgaacttggtgctctaagtccaggcagcctgcaggctggggaccctgggtgcaggtgccaggctcgaggctgttccctgtcctgcctcagtgcctcccctctgcccagcccctgtggcctcttggagaggcgagccagggggctccccggaccgcatggccggtgagagtagagtcggaggcggagagcctggacgcccagaggccggggccaggctctgggtcaaggcaggaaggagacagacagctggcagttcctcgcctcggtgccatcagggaggagccttaagttccactagagcctccggcccagggaggccagaatcagcacaatcccggccccgccctcgcggcgggcgcccccagggccaggagagagagacagggctggctcctctcgcccctggagccgcggtgtggacggcccggccccgtccgccccgccgctctgcgggagtgtcctcgggacacacttaaaccttccaagtagcacagaagccccctccacgtcagaggccccctggccgcggggcctgtgagcggagaggggccctgcttcccacacaaatccgccccggtgcacccccggccaggcaggccccggggcggcctaggcgccttgtcggccgggggtggggctgcttttgcttcctttagaggggcgggcagggagaggaagctctagctccgggcctgagtttccccgaggctgcgtcggaggagctgcagggcgagcccggacggctgccgtctccgccagaggccaccccggcccggcctccagggcgcagaggcgcccccctccatcctcccccatcccgggggccacggcaggggggccgcacagcgcggctgggaccgattcggtgacggcccaaggaagctgggcgcagggctcgcctctcccgcctcgatcctgcaccttcctctcccaggtcgctgctgcagccaacccagtagcccccttagcgcccccgcggaccccgcagctccagactccgctttggcacctctgctccggctggcatggctgcacgctccggctgctagtaggagccgttaggggaggagtttggggtctccacacgatgcctagagaatgctgcagtctgcacattagacgctttttagaagttttgaaattaccttgatttttttaattgttatgaaaatggatcttttcttgactctcccacatgctctgttatgggagagaatcccctaccctactctgatgtatagaccattctcccttcaccagccgaaccaatgtcaaaattaataaagaaatggactaatggcacagggctcta

SEQ ID NO: 38 - DNA, 4885 bp, Homo sapiens
agcacacatgatcttaactgggtctcttctcctgaatccctggggaaagagaaagacgcctacagcacttttttccactgcccctctgtggtcagcctttggtgaggggaactggaagggccttctagatcacacatccaactccctcaattataaatgagggcactgtggaccagaggagccaagggctttctccagggtcacacagtggaccaatgtcagggaccaggagggtccagatccctcagttcccaagccctacatcctcacgtccagcatgcacgtgcaaggccagcatgcccagcctggaactggagacgccgatcagagggcctggcaggctgctgccggtgcccatctcacaggccccgagggctgataaggatgcccttgaaggtgattgatggtttgcaaagcacccacttattagtatttccactggacctctgaaaacagtgatggagatagagagattgcatgtaacttgggacttgggaggtggcctgaaatgactgtgacccagctgatttctctgaggacttaggaggaaatatctgaagttggactcttcttgactgggccaaaaccagatgcttccccggcttctttgcacatacttttccccgtgctttcttgttgaaataagcagcattgtggagtgagaggcatttggaatgtgactcctccgtttacttactcctccacctaggcagaatactttgcttctgtttcctttgtgtaaaatgggaagacgatagaacctccttggttaggactgtggtgaggtgtcagtgaattaatgcgaaatccacatagaaccatgcactatcacaagcgtttgccattatcattcatagtgttagcattcataagcggcatgattgtcccagcagccttgagaaagggtggggagagcactttaatccgtgcttcacagatgaggaaactgaggcacagagaaggtccccagccttcccaagaccccacagtaggtgagttgcagggttagtctgctgtgtcccagatctgtgttctttctgccatgctgcattgccactcagagaggaacaacctgatctagaaagtgaaattttttccagccgcagctgctgcggctacatttgtgaatcagctctgtaaatacaagtttaatacgcgttgttcctgctcagtgggcgttgatagcccagccctggaagagcctttaagaacaggccttaaatagacacaccagctccatgcttcagttttgggaggctgtaccccataaaggaagggtgcaagggcctgtgggctgacaggaattacagaccggcttccaggtggccccaccacctgtgctgggcccctgctgggctcacttgactgtccctgagcccatcactcacccttttggagcaatttttgaaacagaccgctaagtacccaggttattagctggtctcatccctaccatgccggggaacagcatttggatcaccgcagtagcagcccaaggagacacacaagtagctgctttctcggactgtattattttctgaaagtaagaaactttccctgggcagaactctttctagttcccatggggatgggcaggataggcgagaggccgagcccccacttccaggtctctgggcagggcggggttaggcagcagcgggtgtcactcacacagtgactttcacttgtgctttcagtgctcaggacatgggcacctgccggcttccttctagcccggttggacagctccggcagctggtttggggaggtaaaattataggagcgtgatgtcacccgggccactcagggcagagcctggctgctgggcagaagggcacttgggccgggctgcttcagccgagagggccattcggtgtcctgcccacagagagagaaacagtgagagaccaagagagcaaaccagagagatagggagggggaatgcaaggggtccctgggggactcaggagtcccagtggagaatgagaggcaggccccccgtggtggccggggccctggctgccagaggaccgggctggtgaggaggcgaggatgtggactttcgtcacccagctgttggtcacgctggtgctgctgagcttcttcctggtcagctgtcagaacgtgatgcacattgtcagggggtccctgtgctttgtgctaaagcacatccaccaggagctggacaaggagctgggggagagcgagggcctcagtgacgacgaggagaccatctccaccagggtggtccggcggcgggtcttcctgaaggggaatgagtttcagaatattccaggggagcaggtgacagaggagcaattcacggatgagcagggcaacattgtcaccaagaaggatcacacctcgacacccaacccctgaaccccacacactctgccatgcacacaggaggagagctggacctgagggccaccgcagcggtgcacacattcctctgggctgacggcatgacctctgtaagggactcctgctagtcccctcttggcatgaatgactgactgtagacgcatgacctccaggcttcaatcctgcctcttgcaatgacagctgatctgtcggaaccaggacacaaaagcagcaagaagcggggagagagagggatagaaaacaagcgcaggagagcctgcgaacgcaaaagtgaatgagggctttttgtggctggggatgggttttggttttggggttttttttttaaattgttttgacttcgtacagggtactttttcccaacctcatctgtcagaaatccatgtgggcttcctggaaagaaaaaaaaaaaaaaagaaaactaggcatgaaatcagtttaacaccttaatcttaagccatgtcctcatctgcccaccctccccaacccacatacctccattccacttgtgacaccccctcgactccctggtgacgctcctcccagatcgctctacatgacattcaggacacacacacacacacacacacacacaccactcgcctccactgaatctacacacagattttactgtgacttctgaagctgtggataaattggaattttttatgttgtctctctctctgccaatttcaatacgaatcatcttccaatggaaaatcattaccttgaagagtgcattcggggttccttgtgttagggacttaagaatctgaggcgaggacccccaggcttacctgtaggactcaaagggagccaggaccccatctgaaagggtctcctctctcagttgggggacaggccggtggctgacccaggattgcaccagcatgtccatagagaagaggttttctatgtcttcaagcactatatcatagtccgtgttcaaagtgtaaactgtacagtaatcagccttgtgtatatgaaaaacaataaatactatgcaaaccaatagaaacatttagcagtacgtacagagcctgacagcgcagctcctgaggacttctgcggctgcaggagaaggagctgtggcctgtctttcagtgaaagaggaaggaaaggagtagggctagtgaatgtatctgccaggtcttagaagtcaggaccacccagggtctcccagagtgaacttggtgctctaagtccaggcagcctgcaggctggggaccctgggtgcaggtgccaggctcgaggctgttccctgtcctgcctcagtgcctcccctctgcccagcccctgtggcctcttggagaggcgagccagggggctccccggaccgcatggccggtgagagtagagtcggaggcggagagcctggacgcccagaggccggggccaggctctgggtcaaggcaggaaggagacagacagctggcagttcctcgcctcggtgccatcagggaggagccttaagttccactagagcctccggcccagggaggccagaatcagcacaatcccggccccgccctcgcggcgggcgcccccagggccaggagagagagacagggctggctcctctcgcccctggagccgcggtgtggacggcccggccccgtccgccccgccgctctgcgggagtgtcctcgggacacacttaaaccttccaagtagcacagaagccccctccacgtcagaggccccctggccgcggggcctgtgagcggagaggggccctgcttcccacacaaatccgccccggtgcacccccggccaggcaggccccggggcggcctaggcgccttgtcggccgggggtggggctgcttttgcttcctttagaggggcgggcagggagaggaagctctagctccgggcctgagtttccccgaggctgcgtcggaggagctgcagggcgagcccggacggctgccgtctccgccagaggccaccccggcccggcctccagggcgcagaggcgcccccctccatcctcccccatcccgggggccacggcaggggggccgcacagcgcggctgggaccgattcggtgacggcccaaggaagctgggcgcagggctcgcctctcccgcctcgatcctgcaccttcctctcccaggtcgctgctgcagccaacccagtagcccccttagcgcccccgcggaccccgcagctccagactccgctttggcacctctgctccggctggcatggctgcacgctccggctgctagtaggagccgttaggggaggagtttggggtctccacacgatgcctagagaatgctgcagtctgcacattagacgctttttagaagttttgaaattaccttgatttttttaattgttatgaaaatggatcttttcttgactctcccacatgctctgttatgggagagaatcccctaccctactctgatgtatagaccattctcccttcaccagccgaaccaatgtcaaaattaataaagaaatggactaatggcacagggctcta

SEQ ID NO: 39 - DNA, 5020 bp, Homo sapiens
agcacacatgatcttaactgggtctcttctcctgaatccctggggaaagagaaagacgcctacagcacttttttccactgcccctctgtggtcagcctttggtgaggggaactggaagggccttctagatcacacatccaactccctcaattataaatgagggcactgtggaccagaggagccaagggctttctccagggtcacacagtggaccaatgtcagggaccaggagggtccagatccctcagttcccaagccctacatcctcacgtccagcatgcacgtgcaaggccagcatgcccagcctggaactggagacgccgatcagagggcctggcaggctgctgccggtgcccatctcacaggccccgagggctgataaggatgcccttgaaggtgattgatggtttgcaaagcacccacttattagtatttccactggacctctgaaaacagtgatggagatagagagattgcatgtaacttgggacttgggaggtggcctgaaatgactgtgacccagctgatttctctgaggacttaggaggaaatatctgaagttggactcttcttgactgggccaaaaccagatgcttccccggcttctttgcacatacttttccccgtgctttcttgttgaaataagcagcattgtggagtgagaggcatttggaatgtgactcctccgtttacttactcctccacctaggcagaatactttgcttctgtttcctttgtgtaaaatgggaagacgatagaacctccttggttaggactgtggtgaggtgtcagtgaattaatgcgaaatccacatagaaccatgcactatcacaagcgtttgccattatcattcatagtgttagcattcataagcggcatgattgtcccagcagccttgagaaagggtggggagagcactttaatccgtgcttcacagatgaggaaactgaggcacagagaaggtccccagccttcccaagaccccacagtaggtgagttgcagggttagtctgctgtgtcccagatctgtgttctttctgccatgctgcattgccactcagagaggaacaacctgatctagaaagtgaaattttttccagccgcagctgctgcggctacatttgtgaatcagctctgtaaatacaagtttaatacgcgttgttcctgctcagtgggcgttgatagcccagccctggaagagcctttaagaacaggccttaaatagacacaccagctccatgcttcagttttgggaggctgtaccccataaaggaagggtgcaagggcctgtgggctgacaggaattacagaccggcttccaggtggccccaccacctgtgctgggcccctgctgggctcacttgactgtccctgagcccatcactcacccttttggagcaatttttgaaacagaccgctaagtacccaggttattagctggtctcatccctaccatgccggggaacagcatttggatcaccgcagtagcagcccaaggagacacacaagtagctgctttctcggactgtattattttctgaaagtaagaaactttccctgggcagaactctttctagttcccatggggatgggcaggataggcgagaggccgagcccccacttccaggtctctgggcagggcggggttaggcagcagcgggtgtcactcacacagtgactttcacttgtgctttcagtgctcaggacatgggcacctgccggcttccttctagcccggttggacagctccggcagctggtttggggaggtaaaattataggagcgtgatgtcacccgggccactcagggcagagcctggctgctgggcagaagggcacttgggccgggctgcttcagccgagagggccattcggtgtcctgcccacagagagagaaacagtgagagaccaagagagcaaaccagagagatagggagggggaatgcaaggggtccctgggggactcaggagtcccagtggagaatgagaggcaggccccccgtggtggccggggccctggctgccagaggaccgggctggtgaggaggcgaggatgtggactttcgtcacccagctgttggtcacgctggtgctgctgagcttcttcctggtcagctgtcagaacgtgatgcacattgtcagggggtccctgtgctttgtgctaaagcacatccaccaggagctggacaaggagctgggggagagcgagggcctcagtgacgacgaggagaccatctccaccagggtggtccggcggcgggtcttcctgaaggggaatgagtttcagaatattccaggggagcaggtgacagaggagcaattcacggatgagcagggcaacattgtcaccaagaaggtggagctgagagggagtggcctacagccggacctgatagagggcaggaagggggcgcagatagtgaagcgggccagcctgaaaagggggaaacagtgaccccgagccgctctccttggagtagcctctcgggaggatcacacctcgacacccaacccctgaaccccacacactctgccatgcacacaggaggagagctggacctgagggccaccgcagcggtgcacacattcctctgggctgacggcatgacctctgtaagggactcctgctagtcccctcttggcatgaatgactgactgtagacgcatgacctccaggcttcaatcctgcctcttgcaatgacagctgatctgtcggaaccaggacacaaaagcagcaagaagcggggagagagagggatagaaaacaagcgcaggagagcctgcgaacgcaaaagtgaatgagggctttttgtggctggggatgggttttggttttggggttttttttttaaattgttttgacttcgtacagggtactttttcccaacctcatctgtcagaaatccatgtgggcttcctggaaagaaaaaaaaaaaaaaagaaaactaggcatgaaatcagtttaacaccttaatcttaagccatgtcctcatctgcccaccctccccaacccacatacctccattccacttgtgacaccccctcgactccctggtgacgctcctcccagatcgctctacatgacattcaggacacacacacacacacacacacacacaccactcgcctccactgaatctacacacagattttactgtgacttctgaagctgtggataaattggaattttttatgttgtctctctctctgccaatttcaatacgaatcatcttccaatggaaaatcattaccttgaagagtgcattcggggttccttgtgttagggacttaagaatctgaggcgaggacccccaggcttacctgtaggactcaaagggagccaggaccccatctgaaagggtctcctctctcagttgggggacaggccggtggctgacccaggattgcaccagcatgtccatagagaagaggttttctatgtcttcaagcactatatcatagtccgtgttcaaagtgtaaactgtacagtaatcagccttgtgtatatgaaaaacaataaatactatgcaaaccaatagaaacatttagcagtacgtacagagcctgacagcgcagctcctgaggacttctgcggctgcaggagaaggagctgtggcctgtctttcagtgaaagaggaaggaaaggagtagggctagtgaatgtatctgccaggtcttagaagtcaggaccacccagggtctcccagagtgaacttggtgctctaagtccaggcagcctgcaggctggggaccctgggtgcaggtgccaggctcgaggctgttccctgtcctgcctcagtgcctcccctctgcccagcccctgtggcctcttggagaggcgagccagggggctccccggaccgcatggccggtgagagtagagtcggaggcggagagcctggacgcccagaggccggggccaggctctgggtcaaggcaggaaggagacagacagctggcagttcctcgcctcggtgccatcagggaggagccttaagttccactagagcctccggcccagggaggccagaatcagcacaatcccggccccgccctcgcggcgggcgcccccagggccaggagagagagacagggctggctcctctcgcccctggagccgcggtgtggacggcccggccccgtccgccccgccgctctgcgggagtgtcctcgggacacacttaaaccttccaagtagcacagaagccccctccacgtcagaggccccctggccgcggggcctgtgagcggagaggggccctgcttcccacacaaatccgccccggtgcacccccggccaggcaggccccggggcggcctaggcgccttgtcggccgggggtggggctgcttttgcttcctttagaggggcgggcagggagaggaagctctagctccgggcctgagtttccccgaggctgcgtcggaggagctgcagggcgagcccggacggctgccgtctccgccagaggccaccccggcccggcctccagggcgcagaggcgcccccctccatcctcccccatcccgggggccacggcaggggggccgcacagcgcggctgggaccgattcggtgacggcccaaggaagctgggcgcagggctcgcctctcccgcctcgatcctgcaccttcctctcccaggtcgctgctgcagccaacccagtagcccccttagcgcccccgcggaccccgcagctccagactccgctttggcacctctgctccggctggcatggctgcacgctccggctgctagtaggagccgttaggggaggagtttggggtctccacacgatgcctagagaatgctgcagtctgcacattagacgctttttagaagttttgaaattaccttgatttttttaattgttatgaaaatggatcttttcttgactctcccacatgctctgttatgggagagaatcccctaccctactctgatgtatagaccattctcccttcaccagccgaaccaatgtcaaaattaataaagaaatggactaatggcacagggctcta

SEQ ID NO: 40 - DNA, 5128 bp, Homo sapiens
agcacacatgatcttaactgggtctcttctcctgaatccctggggaaagagaaagacgcctacagcacttttttccactgcccctctgtggtcagcctttggtgaggggaactggaagggccttctagatcacacatccaactccctcaattataaatgagggcactgtggaccagaggagccaagggctttctccagggtcacacagtggaccaatgtcagggaccaggagggtccagatccctcagttcccaagccctacatcctcacgtccagcatgcacgtgcaaggccagcatgcccagcctggaactggagacgccgatcagagggcctggcaggctgctgccggtgcccatctcacaggccccgagggctgataaggatgcccttgaaggtgattgatggtttgcaaagcacccacttattagtatttccactggacctctgaaaacagtgatggagatagagagattgcatgtaacttgggacttgggaggtggcctgaaatgactgtgacccagctgatttctctgaggacttaggaggaaatatctgaagttggactcttcttgactgggccaaaaccagatgcttccccggcttctttgcacatacttttccccgtgctttcttgttgaaataagcagcattgtggagtgagaggcatttggaatgtgactcctccgtttacttactcctccacctaggcagaatactttgcttctgtttcctttgtgtaaaatgggaagacgatagaacctccttggttaggactgtggtgaggtgtcagtgaattaatgcgaaatccacatagaaccatgcactatcacaagcgtttgccattatcattcatagtgttagcattcataagcggcatgattgtcccagcagccttgagaaagggtggggagagcactttaatccgtgcttcacagatgaggaaactgaggcacagagaaggtccccagccttcccaagaccccacagtaggtgagttgcagggttagtctgctgtgtcccagatctgtgttctttctgccatgctgcattgccactcagagaggaacaacctgatctagaaagtgaaattttttccagccgcagctgctgcggctacatttgtgaatcagctctgtaaatacaagtttaatacgcgttgttcctgctcagtgggcgttgatagcccagccctggaagagcctttaagaacaggccttaaatagacacaccagctccatgcttcagttttgggaggctgtaccccataaaggaagggtgcaagggcctgtgggctgacaggaattacagaccggcttccaggtggccccaccacctgtgctgggcccctgctgggctcacttgactgtccctgagcccatcactcacccttttggagcaatttttgaaacagaccgctaagtacccaggttattagctggtctcatccctaccatgccggggaacagcatttggatcaccgcagtagcagcccaaggagacacacaagtagctgctttctcggactgtattattttctgaaagtaagaaactttccctgggcagaactctttctagttcccatggggatgggcaggataggcgagaggccgagcccccacttccaggtctctgggcagggcggggttaggcagcagcgggtgtcactcacacagtgactttcacttgtgctttcagtgctcaggacatgggcacctgccggcttccttctagcccggttggacagctccggcagctggtttggggaggtaaaattataggagcgtgatgtcacccgggccactcagggcagagcctggctgctgggcagaagggcacttgggccgggctgcttcagccgagagggccattcggtgtcctgcccacagagagagaaacagtgagagaccaagagagcaaaccagagagatagggagggggaatgcaaggggtccctgggggactcaggagtcccagtggagaatgagaggcaggccccccgtggtggccggggccctggctgccagaggaccgggctggtgaggaggcgaggatgtggactttcgtcacccagctgttggtcacgctggtgctgctgagcttcttcctggtcagctgtcagaacgtgatgcacattgtcagggggtccctgtgctttgtgctaaagcacatccaccaggagctggacaaggagctgggggagagcgagggcctcagtgacgacgaggagaccatctccaccagggtggtccggcggcgggtcttcctgaaggggaatgagtttcagaatattccaggggagcaggtgacagaggagcaattcacggatgagcagggcaacattgtcaccaagaagatcattcgcaaggtggttcgacagatagacttgtccagcgccgatgccgcccaggagcacgaggaggtgactgtagaggggcccctggaggatcccagtgagctggaggtggagctgagagggagtggcctacagccggacctgatagagggcaggaagggggcgcagatagtgaagcgggccagcctgaaaagggggaaacagtgaccccgagccgctctccttggagtagcctctcgggaggatcacacctcgacacccaacccctgaaccccacacactctgccatgcacacaggaggagagctggacctgagggccaccgcagcggtgcacacattcctctgggctgacggcatgacctctgtaagggactcctgctagtcccctcttggcatgaatgactgactgtagacgcatgacctccaggcttcaatcctgcctcttgcaatgacagctgatctgtcggaaccaggacacaaaagcagcaagaagcggggagagagagggatagaaaacaagcgcaggagagcctgcgaacgcaaaagtgaatgagggctttttgtggctggggatgggttttggttttggggttttttttttaaattgttttgacttcgtacagggtactttttcccaacctcatctgtcagaaatccatgtgggcttcctggaaagaaaaaaaaaaaaaaagaaaactaggcatgaaatcagtttaacaccttaatcttaagccatgtcctcatctgcccaccctccccaacccacatacctccattccacttgtgacaccccctcgactccctggtgacgctcctcccagatcgctctacatgacattcaggacacacacacacacacacacacacacaccactcgcctccactgaatctacacacagattttactgtgacttctgaagctgtggataaattggaattttttatgttgtctctctctctgccaatttcaatacgaatcatcttccaatggaaaatcattaccttgaagagtgcattcggggttccttgtgttagggacttaagaatctgaggcgaggacccccaggcttacctgtaggactcaaagggagccaggaccccatctgaaagggtctcctctctcagttgggggacaggccggtggctgacccaggattgcaccagcatgtccatagagaagaggttttctatgtcttcaagcactatatcatagtccgtgttcaaagtgtaaactgtacagtaatcagccttgtgtatatgaaaaacaataaatactatgcaaaccaatagaaacatttagcagtacgtacagagcctgacagcgcagctcctgaggacttctgcggctgcaggagaaggagctgtggcctgtctttcagtgaaagaggaaggaaaggagtagggctagtgaatgtatctgccaggtcttagaagtcaggaccacccagggtctcccagagtgaacttggtgctctaagtccaggcagcctgcaggctggggaccctgggtgcaggtgccaggctcgaggctgttccctgtcctgcctcagtgcctcccctctgcccagcccctgtggcctcttggagaggcgagccagggggctccccggaccgcatggccggtgagagtagagtcggaggcggagagcctggacgcccagaggccggggccaggctctgggtcaaggcaggaaggagacagacagctggcagttcctcgcctcggtgccatcagggaggagccttaagttccactagagcctccggcccagggaggccagaatcagcacaatcccggccccgccctcgcggcgggcgcccccagggccaggagagagagacagggctggctcctctcgcccctggagccgcggtgtggacggcccggccccgtccgccccgccgctctgcgggagtgtcctcgggacacacttaaaccttccaagtagcacagaagccccctccacgtcagaggccccctggccgcggggcctgtgagcggagaggggccctgcttcccacacaaatccgccccggtgcacccccggccaggcaggccccggggcggcctaggcgccttgtcggccgggggtggggctgcttttgcttcctttagaggggcgggcagggagaggaagctctagctccgggcctgagtttccccgaggctgcgtcggaggagctgcagggcgagcccggacggctgccgtctccgccagaggccaccccggcccggcctccagggcgcagaggcgcccccctccatcctcccccatcccgggggccacggcaggggggccgcacagcgcggctgggaccgattcggtgacggcccaaggaagctgggcgcagggctcgcctctcccgcctcgatcctgcaccttcctctcccaggtcgctgctgcagccaacccagtagcccccttagcgcccccgcggaccccgcagctccagactccgctttggcacctctgctccggctggcatggctgcacgctccggctgctagtaggagccgttaggggaggagtttggggtctccacacgatgcctagagaatgctgcagtctgcacattagacgctttttagaagttttgaaattaccttgatttttttaattgttatgaaaatggatcttttcttgactctcccacatgctctgttatgggagagaatcccctaccctactctgatgtatagaccattctcccttcaccagccgaaccaatgtcaaaattaataaagaaatggactaatggcacagggctcta

SEQ ID NO: 41 - DNA, 5161 bp, Homo sapiens
agcacacatgatcttaactgggtctcttctcctgaatccctggggaaagagaaagacgcctacagcacttttttccactgcccctctgtggtcagcctttggtgaggggaactggaagggccttctagatcacacatccaactccctcaattataaatgagggcactgtggaccagaggagccaagggctttctccagggtcacacagtggaccaatgtcagggaccaggagggtccagatccctcagttcccaagccctacatcctcacgtccagcatgcacgtgcaaggccagcatgcccagcctggaactggagacgccgatcagagggcctggcaggctgctgccggtgcccatctcacaggccccgagggctgataaggatgcccttgaaggtgattgatggtttgcaaagcacccacttattagtatttccactggacctctgaaaacagtgatggagatagagagattgcatgtaacttgggacttgggaggtggcctgaaatgactgtgacccagctgatttctctgaggacttaggaggaaatatctgaagttggactcttcttgactgggccaaaaccagatgcttccccggcttctttgcacatacttttccccgtgctttcttgttgaaataagcagcattgtggagtgagaggcatttggaatgtgactcctccgtttacttactcctccacctaggcagaatactttgcttctgtttcctttgtgtaaaatgggaagacgatagaacctccttggttaggactgtggtgaggtgtcagtgaattaatgcgaaatccacatagaaccatgcactatcacaagcgtttgccattatcattcatagtgttagcattcataagcggcatgattgtcccagcagccttgagaaagggtggggagagcactttaatccgtgcttcacagatgaggaaactgaggcacagagaaggtccccagccttcccaagaccccacagtaggtgagttgcagggttagtctgctgtgtcccagatctgtgttctttctgccatgctgcattgccactcagagaggaacaacctgatctagaaagtgaaattttttccagccgcagctgctgcggctacatttgtgaatcagctctgtaaatacaagtttaatacgcgttgttcctgctcagtgggcgttgatagcccagccctggaagagcctttaagaacaggccttaaatagacacaccagctccatgcttcagttttgggaggctgtaccccataaaggaagggtgcaagggcctgtgggctgacaggaattacagaccggcttccaggtggccccaccacctgtgctgggcccctgctgggctcacttgactgtccctgagcccatcactcacccttttggagcaatttttgaaacagaccgctaagtacccaggttattagctggtctcatccctaccatgccggggaacagcatttggatcaccgcagtagcagcccaaggagacacacaagtagctgctttctcggactgtattattttctgaaagtaagaaactttccctgggcagaactctttctagttcccatggggatgggcaggataggcgagaggccgagcccccacttccaggtctctgggcagggcggggttaggcagcagcgggtgtcactcacacagtgactttcacttgtgctttcagtgctcaggacatgggcacctgccggcttccttctagcccggttggacagctccggcagctggtttggggaggtaaaattataggagcgtgatgtcacccgggccactcagggcagagcctggctgctgggcagaagggcacttgggccgggctgcttcagccgagagggccattcggtgtcctgcccacagagagagaaacagtgagagaccaagagagcaaaccagagagatagggagggggaatgcaaggggtccctgggggactcaggagtcccagtggagaatgagaggcaggccccccgtggtggccggggccctggctgccagaggaccgggctggtgaggaggcgaggatgtggactttcgtcacccagctgttggtcacgctggtgctgctgagcttcttcctggtcagctgtcagaacgtgatgcacattgtcagggggtccctgtgctttgtgctaaagcacatccaccaggagctggacaaggagctgggggagagcgagggcctcagtgacgacgaggagaccatctccaccagggtggtccggcggcgggtcttcctgaaggggaatgagtttcagaatattccaggggagcaggtgacagaggagcaattcacggatgagcagggcaacattgtcaccaagaagatcattcgcaaggtggttcgacagatagacttgtccagcgccgatgccgcccaggagcacgaggaggtgactgtagaggggcccctggaggatcccagtgagctggaggtcgatattgattactttatgaaacactccaaggtggagctgagagggagtggcctacagccggacctgatagagggcaggaagggggcgcagatagtgaagcgggccagcctgaaaagggggaaacagtgaccccgagccgctctccttggagtagcctctcgggaggatcacacctcgacacccaacccctgaaccccacacactctgccatgcacacaggaggagagctggacctgagggccaccgcagcggtgcacacattcctctgggctgacggcatgacctctgtaagggactcctgctagtcccctcttggcatgaatgactgactgtagacgcatgacctccaggcttcaatcctgcctcttgcaatgacagctgatctgtcggaaccaggacacaaaagcagcaagaagcggggagagagagggatagaaaacaagcgcaggagagcctgcgaacgcaaaagtgaatgagggctttttgtggctggggatgggttttggttttggggttttttttttaaattgttttgacttcgtacagggtactttttcccaacctcatctgtcagaaatccatgtgggcttcctggaaagaaaaaaaaaaaaaaagaaaactaggcatgaaatcagtttaacaccttaatcttaagccatgtcctcatctgcccaccctccccaacccacatacctccattccacttgtgacaccccctcgactccctggtgacgctcctcccagatcgctctacatgacattcaggacacacacacacacacacacacacacaccactcgcctccactgaatctacacacagattttactgtgacttctgaagctgtggataaattggaattttttatgttgtctctctctctgccaatttcaatacgaatcatcttccaatggaaaatcattaccttgaagagtgcattcggggttccttgtgttagggacttaagaatctgaggcgaggacccccaggcttacctgtaggactcaaagggagccaggaccccatctgaaagggtctcctctctcagttgggggacaggccggtggctgacccaggattgcaccagcatgtccatagagaagaggttttctatgtcttcaagcactatatcatagtccgtgttcaaagtgtaaactgtacagtaatcagccttgtgtatatgaaaaacaataaatactatgcaaaccaatagaaacatttagcagtacgtacagagcctgacagcgcagctcctgaggacttctgcggctgcaggagaaggagctgtggcctgtctttcagtgaaagaggaaggaaaggagtagggctagtgaatgtatctgccaggtcttagaagtcaggaccacccagggtctcccagagtgaacttggtgctctaagtccaggcagcctgcaggctggggaccctgggtgcaggtgccaggctcgaggctgttccctgtcctgcctcagtgcctcccctctgcccagcccctgtggcctcttggagaggcgagccagggggctccccggaccgcatggccggtgagagtagagtcggaggcggagagcctggacgcccagaggccggggccaggctctgggtcaaggcaggaaggagacagacagctggcagttcctcgcctcggtgccatcagggaggagccttaagttccactagagcctccggcccagggaggccagaatcagcacaatcccggccccgccctcgcggcgggcgcccccagggccaggagagagagacagggctggctcctctcgcccctggagccgcggtgtggacggcccggccccgtccgccccgccgctctgcgggagtgtcctcgggacacacttaaaccttccaagtagcacagaagccccctccacgtcagaggccccctggccgcggggcctgtgagcggagaggggccctgcttcccacacaaatccgccccggtgcacccccggccaggcaggccccggggcggcctaggcgccttgtcggccgggggtggggctgcttttgcttcctttagaggggcgggcagggagaggaagctctagctccgggcctgagtttccccgaggctgcgtcggaggagctgcagggcgagcccggacggctgccgtctccgccagaggccaccccggcccggcctccagggcgcagaggcgcccccctccatcctcccccatcccgggggccacggcaggggggccgcacagcgcggctgggaccgattcggtgacggcccaaggaagctgggcgcagggctcgcctctcccgcctcgatcctgcaccttcctctcccaggtcgctgctgcagccaacccagtagcccccttagcgcccccgcggaccccgcagctccagactccgctttggcacctctgctccggctggcatggctgcacgctccggctgctagtaggagccgttaggggaggagtttggggtctccacacgatgcctagagaatgctgcagtctgcacattagacgctttttagaagttttgaaattaccttgatttttttaattgttatgaaaatggatcttttcttgactctcccacatgctctgttatgggagagaatcccctaccctactctgatgtatagaccattctcccttcaccagccgaaccaatgtcaaaattaataaagaaatggactaatggcacagggctcta

SEQ ID NO: 42 - DNA, 4993 bp, Homo sapiens
agcacacatgatcttaactgggtctcttctcctgaatccctggggaaagagaaagacgcctacagcacttttttccactgcccctctgtggtcagcctttggtgaggggaactggaagggccttctagatcacacatccaactccctcaattataaatgagggcactgtggaccagaggagccaagggctttctccagggtcacacagtggaccaatgtcagggaccaggagggtccagatccctcagttcccaagccctacatcctcacgtccagcatgcacgtgcaaggccagcatgcccagcctggaactggagacgccgatcagagggcctggcaggctgctgccggtgcccatctcacaggccccgagggctgataaggatgcccttgaaggtgattgatggtttgcaaagcacccacttattagtatttccactggacctctgaaaacagtgatggagatagagagattgcatgtaacttgggacttgggaggtggcctgaaatgactgtgacccagctgatttctctgaggacttaggaggaaatatctgaagttggactcttcttgactgggccaaaaccagatgcttccccggcttctttgcacatacttttccccgtgctttcttgttgaaataagcagcattgtggagtgagaggcatttggaatgtgactcctccgtttacttactcctccacctaggcagaatactttgcttctgtttcctttgtgtaaaatgggaagacgatagaacctccttggttaggactgtggtgaggtgtcagtgaattaatgcgaaatccacatagaaccatgcactatcacaagcgtttgccattatcattcatagtgttagcattcataagcggcatgattgtcccagcagccttgagaaagggtggggagagcactttaatccgtgcttcacagatgaggaaactgaggcacagagaaggtccccagccttcccaagaccccacagtaggtgagttgcagggttagtctgctgtgtcccagatctgtgttctttctgccatgctgcattgccactcagagaggaacaacctgatctagaaagtgaaattttttccagccgcagctgctgcggctacatttgtgaatcagctctgtaaatacaagtttaatacgcgttgttcctgctcagtgggcgttgatagcccagccctggaagagcctttaagaacaggccttaaatagacacaccagctccatgcttcagttttgggaggctgtaccccataaaggaagggtgcaagggcctgtgggctgacaggaattacagaccggcttccaggtggccccaccacctgtgctgggcccctgctgggctcacttgactgtccctgagcccatcactcacccttttggagcaatttttgaaacagaccgctaagtacccaggttattagctggtctcatccctaccatgccggggaacagcatttggatcaccgcagtagcagcccaaggagacacacaagtagctgctttctcggactgtattattttctgaaagtaagaaactttccctgggcagaactctttctagttcccatggggatgggcaggataggcgagaggccgagcccccacttccaggtctctgggcagggcggggttaggcagcagcgggtgtcactcacacagtgactttcacttgtgctttcagtgctcaggacatgggcacctgccggcttccttctagcccggttggacagctccggcagctggtttggggaggtaaaattataggagcgtgatgtcacccgggccactcagggcagagcctggctgctgggcagaagggcacttgggccgggctgcttcagccgagagggccattcggtgtcctgcccacagagagagaaacagtgagagaccaagagagcaaaccagagagatagggagggggaatgcaaggggtccctgggggactcaggagtcccagtggagaatgagaggcaggccccccgtggtggccggggccctggctgccagaggaccgggctggtgaggaggcgaggatgtggactttcgtcacccagctgttggtcacgctggtgctgctgagcttcttcctggtcagctgtcagaacgtgatgcacattgtcagggggtccctgtgctttgtgctaaagcacatccaccaggagctggacaaggagctgggggagagcgagggcctcagtgacgacgaggagaccatctccaccagggtggtccggcggcgggtcttcctgaaggggaatgagtttcagaatattccaggggagcaggtgacagaggagcaattcacggatgagcagggcaacattgtcaccaagaagatcattcgcaaggtggttcgacagatagacttgtccagcgccgatgccgcccaggagcacgaggaggtgactgtagaggggcccctggaggatcccagtgagctggaggatcacacctcgacacccaacccctgaaccccacacactctgccatgcacacaggaggagagctggacctgagggccaccgcagcggtgcacacattcctctgggctgacggcatgacctctgtaagggactcctgctagtcccctcttggcatgaatgactgactgtagacgcatgacctccaggcttcaatcctgcctcttgcaatgacagctgatctgtcggaaccaggacacaaaagcagcaagaagcggggagagagagggatagaaaacaagcgcaggagagcctgcgaacgcaaaagtgaatgagggctttttgtggctggggatgggttttggttttggggttttttttttaaattgttttgacttcgtacagggtactttttcccaacctcatctgtcagaaatccatgtgggcttcctggaaagaaaaaaaaaaaaaaagaaaactaggcatgaaatcagtttaacaccttaatcttaagccatgtcctcatctgcccaccctccccaacccacatacctccattccacttgtgacaccccctcgactccctggtgacgctcctcccagatcgctctacatgacattcaggacacacacacacacacacacacacacaccactcgcctccactgaatctacacacagattttactgtgacttctgaagctgtggataaattggaattttttatgttgtctctctctctgccaatttcaatacgaatcatcttccaatggaaaatcattaccttgaagagtgcattcggggttccttgtgttagggacttaagaatctgaggcgaggacccccaggcttacctgtaggactcaaagggagccaggaccccatctgaaagggtctcctctctcagttgggggacaggccggtggctgacccaggattgcaccagcatgtccatagagaagaggttttctatgtcttcaagcactatatcatagtccgtgttcaaagtgtaaactgtacagtaatcagccttgtgtatatgaaaaacaataaatactatgcaaaccaatagaaacatttagcagtacgtacagagcctgacagcgcagctcctgaggacttctgcggctgcaggagaaggagctgtggcctgtctttcagtgaaagaggaaggaaaggagtagggctagtgaatgtatctgccaggtcttagaagtcaggaccacccagggtctcccagagtgaacttggtgctctaagtccaggcagcctgcaggctggggaccctgggtgcaggtgccaggctcgaggctgttccctgtcctgcctcagtgcctcccctctgcccagcccctgtggcctcttggagaggcgagccagggggctccccggaccgcatggccggtgagagtagagtcggaggcggagagcctggacgcccagaggccggggccaggctctgggtcaaggcaggaaggagacagacagctggcagttcctcgcctcggtgccatcagggaggagccttaagttccactagagcctccggcccagggaggccagaatcagcacaatcccggccccgccctcgcggcgggcgcccccagggccaggagagagagacagggctggctcctctcgcccctggagccgcggtgtggacggcccggccccgtccgccccgccgctctgcgggagtgtcctcgggacacacttaaaccttccaagtagcacagaagccccctccacgtcagaggccccctggccgcggggcctgtgagcggagaggggccctgcttcccacacaaatccgccccggtgcacccccggccaggcaggccccggggcggcctaggcgccttgtcggccgggggtggggctgcttttgcttcctttagaggggcgggcagggagaggaagctctagctccgggcctgagtttccccgaggctgcgtcggaggagctgcagggcgagcccggacggctgccgtctccgccagaggccaccccggcccggcctccagggcgcagaggcgcccccctccatcctcccccatcccgggggccacggcaggggggccgcacagcgcggctgggaccgattcggtgacggcccaaggaagctgggcgcagggctcgcctctcccgcctcgatcctgcaccttcctctcccaggtcgctgctgcagccaacccagtagcccccttagcgcccccgcggaccccgcagctccagactccgctttggcacctctgctccggctggcatggctgcacgctccggctgctagtaggagccgttaggggaggagtttggggtctccacacgatgcctagagaatgctgcagtctgcacattagacgctttttagaagttttgaaattaccttgatttttttaattgttatgaaaatggatcttttcttgactctcccacatgctctgttatgggagagaatcccctaccctactctgatgtatagaccattctcccttcaccagccgaaccaatgtcaaaattaataaagaaatggactaatggcacagggctcta

SEQ ID NO: 43 - DNA, 2490 bp, Homo sapiens
agcacacatgatcttaactgggtctcttctcctgaatccctggggaaagagaaagacgcctacagcacttttttccactgcccctctgtggtcagcctttggtgaggggaactggaagggccttctagatcacacatccaactccctcaattataaatgagggcactgtggaccagaggagccaagggctttctccagggtcacacagtggaccaatgtcagggaccaggagggtccagatccctcagttcccaagccctacatcctcacgtccagcatgcacgtgcaaggccagcatgcccagcctggaactggagacgccgatcagagggcctggcaggctgctgccggtgcccatctcacaggccccgagggctgataaggatgcccttgaaggtgattgatggtttgcaaagcacccacttattagtatttccactggacctctgaaaacagtgatggagatagagagattgcatgtaacttgggacttgggaggtggcctgaaatgactgtgacccagctgatttctctgaggacttaggaggaaatatctgaagttggactcttcttgactgggccaaaaccagatgcttccccggcttctttgcacatacttttccccgtgctttcttgttgaaataagcagcattgtggagtgagaggcatttggaatgtgactcctccgtttacttactcctccacctaggcagaatactttgcttctgtttcctttgtgtaaaatgggaagacgatagaacctccttggttaggactgtggtgaggtgtcagtgaattaatgcgaaatccacatagaaccatgcactatcacaagcgtttgccattatcattcatagtgttagcattcataagcggcatgattgtcccagcagccttgagaaagggtggggagagcactttaatccgtgcttcacagatgaggaaactgaggcacagagaaggtccccagccttcccaagaccccacagtaggtgagttgcagggttagtctgctgtgtcccagatctgtgttctttctgccatgctgcattgccactcagagaggaacaacctgatctagaaagtgaaattttttccagccgcagctgctgcggctacatttgtgaatcagctctgtaaatacaagtttaatacgcgttgttcctgctcagtgggcgttgatagcccagccctggaagagcctttaagaacaggccttaaatagacacaccagctccatgcttcagttttgggaggctgtaccccataaaggaagggtgcaagggcctgtgggctgacaggaattacagaccggcttccaggtggccccaccacctgtgctgggcccctgctgggctcacttgactgtccctgagcccatcactcacccttttggagcaatttttgaaacagaccgctaagtacccaggttattagctggtctcatccctaccatgccggggaacagcatttggatcaccgcagtagcagcccaaggagacacacaagtagctgctttctcggactgtattattttctgaaagtaagaaactttccctgggcagaactctttctagttcccatggggatgggcaggataggcgagaggccgagcccccacttccaggtctctgggcagggcggggttaggcagcagcgggtgtcactcacacagtgactttcacttgtgctttcagtgctcaggacatgggcacctgccggcttccttctagcccggttggacagctccggcagctggtttggggaggtaaaattataggagcgtgatgtcacccgggccactcagggcagagcctggctgctgggcagaagggcacttgggccgggctgcttcagccgagagggccattcggtgtcctgcccacagagagagaaacagtgagagaccaagagagcaaaccagagagatagggagggggaatgcaaggggtccctgggggactcaggagtcccagtggagaatgagaggcaggccccccgtggtggccggggccctggctgccagaggaccgggctggtgaggaggcgaggatgtggactttcgtcacccagctgttggtcacgctggtgctgctgagcttcttcctggtcagctgtcagaacgtgatgcacattgtcagggggtccctgtgctttgtgctaaagcacatccaccaggagctggacaaggagctgggggagagcgagggcctcagtgacgacgaggagaccatctccaccagggtggtccggcggcgggtcttcctgaaggggaatgagtttcagaatattccaggggagcaggtgacagaggagcaattcacggatgagcagggcaacattgtcaccaagaaggtgggtgcagagtgttcccctctgtgctggggagaggcaggtgggctagaagctaaaaggtggtagaagccagtggcttctccctgctgccctcacagcaggtgagcacagccaggctggctgcccccgtgctca

SEQ ID NO: 44 - DNA, 3332 bp, Homo sapiens
gagctggagagagcgagagcaaagagcgagcgagggagaggagagagagagagaggagagagaaagacacacgcacgcagagacacacggtcactggaattccattagaaaaaagtgagccgagcaagggttagcgggagaagatttttttgaatcttgtcttcgtcttggtgcgaaagaagcgactccagtctctcgtcctcgaagctccgactggattgttcttgggcgctgacacccgtctgtggatttcttttctatttgcattttattccgaccccctccctcgccgcttccttccagcccttcactcgcaaatcgcctctctccccacctccccaggcccctcctgggaagcgcaggggaattggacccgcggggactcacgccttcccggacgattggaggggagggctgaccccaggactgggctgttggcttagaaagccgatacacagatacgcgtatatttgattgtagcgggcaaggggggcgtcgagaggcagcagcccatcgcccgcctctcaccccaccccctccagccagaggcgagaatcgcaggactcgggatcttcatcgggtggactagctgggatctccgcattggatttggggctgattaccactgcttgcctattattattgttgttgttactactattatttttttttacccaagggagaaagacaaaaaaacggtgggatttatttaacatgatcttggcaaacgtcttctgcctcttcttctttctagggccccgagctccacggctggcgccccccagtggactgtgtccgggccaatgagctgtgtgccgccgaatccaactgcagctctcgctaccgcactctgcggcagtgcctggcaggccgcgaccgcaacaccatgctggccaacaaggagtgccaggcggccttggaggtcttgcaggagagcccgctgtacgactgccgctgcaagcggggcatgaagaaggagctgcagtgtctgcagatctactggagcatccacctggggctgaccgagggtgaggagttctacgaagcctccccctatgagccggtgacctcccgcctctcggacatcttcaggcttgcttcaatcttctcagggacaggggcagacccggtggtcagcgccaagagcaaccattgcctggatgctgccaaggcctgcaacctgaatgacaactgcaagaagctgcgctcctcctacatctccatctgcaaccgcgagatctcgcccaccgagcgctgcaaccgccgcaagtgccacaaggccctgcgccagttcttcgaccgggtgcccagcgagtacacctaccgcatgctcttctgctcctgccaagaccaggcgtgcgctgagcgccgccggcaaaccatcctgcccagctgctcctatgaggacaaggagaagcccaactgcctggacctgcgtggcgtgtgccggactgaccacctgtgtcggtcccggctggccgacttccatgccaattgtcgagcctcctaccagacggtcaccagctgccctgcggacaattaccaggcgtgtctgggctcttatgctggcatgattgggtttgacatgacacctaactatgtggactccagccccactggcatcgtggtgtccccctggtgcagctgtcgtggcagcgggaacatggaggaggagtgtgagaagttcctcagggacttcaccgagaacccatgcctccggaacgccatccaggcctttggcaacggcacggacgtgaacgtgtccccaaaaggcccctcgttccaggccacccaggcccctcgggtggagaagacgccttctttgccagatgacctcagtgacagtaccagcttggggaccagtgtcatcaccacctgcacgtctgtccaggagcaggggctgaaggccaacaactccaaagagttaagcatgtgcttcacagagctcacgacaaatatcatcccagggagtaacaaggtgatcaaacctaactcaggccccagcagagccagaccgtcggctgccttgaccgtgctgtctgtcctgatgctgaaacaggccttgtaggctgtgggaaccgagtcagaagatttttgaaagctacgcagacaagaacagccgcctgacgaaatggaaacacacacagacacacacacaccttgcaaaaaaaaaattgtttttcccaccttgtcgctgaacctgtctcctcccaggtttcttctctggagaagtttttgtaaaccaaacagacaagcaggcaggcagcctgagagctggcccaggggtcccctggcaggggaaactctggtgccggggagggcacgaggctctagaaatgcccttcactttctcctggtgtttttctctctggacccttctgaagcagagaccggacaagagcctgcagcggaagggactctgggctgtgcctgaggctggctgggggcaggacaacacagctgcttccccaggctgcccactctggggacccgctgggggctggcagagggcatcggtcagcggggcagcggggctggccatgagggtccaccttcagccctttggcttcaaggatggagatggttttgccctccctctctgccctcgggtggggctggtgggtctgcagctggtgtgggaacttccccacggatggcggtggagggggttcgcaccgtgctgggctccccctgactgtagcacggagtgttggggctgggggccagctccaggagggcttgagagctcagcctgcctgggagagcccttgtggcgaggcattaaaacttgggcaccagcttctttctcggtggcagaaattttgaagtcagagagaaacggtcctttgttggcttctttgctttctcgtgggtcctttggcaggcctccctttggggagagggaggggagagaccacagccgggtgtgtgtctgcagcaccgtgggccctcaagctttcctgctgtcttctccctcctcctcctttcccctttctctttcctcatttcctagacgtacgtcaactgtatgtacataccggggctcctctcctaacatatatgtatatacacatccatatacatatattgtgtggtttcccctttctttcctttttttaagcaacaaaactatggaaataataccccaacagatgagcgaaaatgtattattgtaaagtttattttttttaatactgttgtctataatggggaaaaaggacattggccccgcagtgccctgccccagtcagcctggctgggctctggtgggggctcctgatccgcatccaagcttaaccaaggctccaataaacgtgctaggaagcaagctg

SEQ ID NO: 45 - DNA, 3615 bp, Homo sapiens
acacagtactctcagcttgttggtggaagcccctcatctgccttcattctgaaggcagggcccggcagaggaaggatcagagggtcgcggccggagggtcccggccggtggggccaactcagagggagaggaaagggctagagacacgaagaacgcaaaccatcaaatttagaagaaaaagccctttgactttttccccctctccctccccaatggctgtgtagcaaacatccctggcgataccttggaaaggacgaagttggtctgcagtcgcaatttcgtgggttgagttcacagttgtgagtgcggggctcggagatggagccgtggtcctctaggtggaaaacgaaacggtggctctgggatttcaccgtaacaaccctcgcattgaccttcctcttccaagctagagaggtcagaggagctgctccagttgatgtactaaaagcactagattttcacaattctccagagggaatatcaaaaacaacgggattttgcacaaacagaaagaattctaaaggctcagatactgcttacagagtttcaaagcaagcacaactcagtgccccaacaaaacagttatttccaggtggaactttcccagaagacttttcaatactatttacagtaaaaccaaaaaaaggaattcagtctttccttttatctatatataatgagcatggtattcagcaaattggtgttgaggttgggagatcacctgtttttctgtttgaagaccacactggaaaacctgccccagaagactatcccctcttcagaactgttaacatcgctgacgggaagtggcatcgggtagcaatcagcgtggagaagaaaactgtgacaatgattgttgattgtaagaagaaaaccacgaaaccacttgatagaagtgagagagcaattgttgataccaatggaatcacggtttttggaacaaggattttggatgaagaagtttttgagggggacattcagcagtttttgatcacaggtgatcccaaggcagcatatgactactgtgagcattatagtccagactgtgactcttcagcacccaaggctgctcaagctcaggaacctcagatagatgagtatgcaccagaggatataatcgaatatgactatgagtatggggaagcagagtataaagaggctgaaagtgtaacagagggacccactgtaactgaggagacaatagcacagacggaggcaaacatcgttgatgattttcaagaatacaactatggaacaatggaaagttaccagacagaagctcctaggcatgtttctgggacaaatgagccaaatccagttgaagaaatatttactgaagaatatctaacgggagaggattatgattcccagaggaaaaattctgaggatacactatatgaaaacaaagaaatagacggcagggattctgatcttctggtagatggagatttaggcgaatatgatttttatgaatataaagaatatgaagataaaccaacaagcccccctaatgaagaatttggtccaggtgtaccagcagaaactgatattacagaaacaagcataaatggccatggtgcatatggagagaaaggacagaaaggagaaccagcagtggttgagcctggtatgcttgtcgaaggaccaccaggaccagcaggacctgcaggtattatgggtcctccaggtctacaaggccccactggaccccctggtgaccctggcgataggggccccccaggacgtcctggcttaccaggggctgatggtctacctggtcctcctggtactatgttgatgttaccgttccgttatggtggtgatggttccaaaggaccaaccatctctgctcaggaagctcaggctcaagctattcttcagcaggctcggattgctctgagaggcccacctggcccaatgggtctaactggaagaccaggtcctgtgggggggcctggttcatctggggccaaaggtgagagtggtgatccaggtcctcagggccctcgaggcgtccagggtccccctggtccaacgggaaaacctggaaaaaggggtcgtccaggtgcagatggaggaagaggaatgccaggagaacctggggcaaagggagatcgagggtttgatggacttccgggtctgccaggtgacaaaggtcacaggggtgaacgaggtcctcaaggtcctccaggtcctcctggtgatgatggaatgaggggagaagatggagaaattggaccaagaggtcttccaggtgaagctggcccacgaggtttgctgggtccaaggggaactccaggagctccagggcagcctggtatggcaggtgtagatggccccccaggaccaaaagggaacatgggtccccaaggggagcctgggcctccaggtcaacaagggaatccaggacctcagggtcttcctggtccacaaggtccaattggtcctcctggtgaaaaaggaccacaaggaaaaccaggacttgctggacttcctggtgctgatgggcctcctggtcatcctgggaaagaaggccagtctggagaaaagggggctctgggtccccctggtccacaaggtcctattggatacccgggcccccggggagtaaagggagcagatggtgtcagaggtctcaagggatctaaaggtgaaaagggtgaagatggttttccaggattcaaaggtgacatgggtctaaaaggtgacagaggagaagttggtcaaattggcccaagaggggaagatggccctgaaggacccaaaggtcgagcaggcccaactggagacccaggtccttcaggtcaagcaggagaaaagggaaaacttggagttccaggattaccaggatatccaggaagacaaggtccaaagggttccactggattccctgggtttccaggtgccaatggagagaaaggtgcacggggagtagctggcaaaccaggccctcggggtcagcgtggtccaacgggtcctcgaggttcaagaggtgcaagaggtcccactgggaaacctgggccaaagggcacttcaggtggcgatggccctcctggccctccaggtgaaagaggtcctcaaggacctcagggtccagttggattccctggaccaaaaggccctcctggaccacctgggaaggatgggctgccaggacaccctgggcaacgtggggagactggatttcaaggcaagaccggccctcctgggccagggggagtggttggaccacagggaccaaccggtgagactggtccaataggggaacgtgggcatcctggccctcctggccctcctggtgagcaaggtcttcctggtgctgcaggaaaagaaggtgcaaagggtgatccaggtcctcaaggtatctcagggaaagatggaccagcaggattacgtggtttcccaggggaaagaggtcttcctggagctcagggtgcacctggactgaaaggaggggaaggtccccagggcccaccaggtccagttgtaagtatgatgataataaatagccagacaatcatggttgtgaattacagctcttctttcattactctcatgctgtgattccacagtgtgtgggagagaaaataaacacatgtcaatcaaatcagtcaa

SEQ ID NO: 46 - DNA, 2648 bp, Homo sapiens
acacagtactctcagcttgttggtggaagcccctcatctgccttcattctgaaggcagggcccggcagaggaaggatcagagggtcgcggccggagggtcccggccggtggggccaactcagagggagaggaaagggctagagacacgaagaacgcaaaccatcaaatttagaagaaaaagccctttgactttttccccctctccctccccaatggctgtgtagcaaacatccctggcgataccttggaaaggacgaagttggtctgcagtcgcaatttcgtgggttgagttcacagttgtgagtgcggggctcggagatggagccgtggtcctctaggtggaaaacgaaacggtggctctgggatttcaccgtaacaaccctcgcattgaccttcctcttccaagctagagaggtcagaggagctgctccagttgatgtactaaaagcactagattttcacaattctccagagggaatatcaaaaacaacgggattttgcacaaacagaaagaattctaaaggctcagatactgcttacagagtttcaaagcaagcacaactcagtgccccaacaaaacagttatttccaggtggaactttcccagaagacttttcaatactatttacagtaaaaccaaaaaaaggaattcagtctttccttttatctatatataatgagcatggtattcagcaaattggtgttgaggttgggagatcacctgtttttctgtttgaagaccacactggaaaacctgccccagaagactatcccctcttcagaactgttaacatcgctgacgggaagtggcatcgggtagcaatcagcgtggagaagaaaactgtgacaatgattgttgattgtaagaagaaaaccacgaaaccacttgatagaagtgagagagcaattgttgataccaatggaatcacggtttttggaacaaggattttggatgaagaagtttttgagggggacattcagcagtttttgatcacaggtgatcccaaggcagcatatgactactgtgagcattatagtccagactgtgactcttcagcacccaaggctgctcaagctcaggaacctcagatagatgagtatgcaccagaggatataatcgaatatgactatgagtatggggaagcagagtataaagaggctgaaagtgtaacagagggacccactgtaactgaggagacaatagcacagacggaggcaaacatcgttgatgattttcaagaatacaactatggaacaatggaaagttaccagacagaagctcctaggcatgtttctgggacaaatgagccaaatccagttgaagaaatatttactgaagaatatctaacgggagaggattatgattcccagaggaaaaattctgaggatacactatatgaaaacaaagaaatagacggcagggattctgatcttctggtagatggagatttaggcgaatatgatttttatgaatataaagaatatgaagataaaccaacaagcccccctaatgaagaatttggtccaggtgtaccagcagaaactgatattacagaaacaagcataaatggccatggtgcatatggagagaaaggacagaaaggagaaccagcagtggttgagcctggtatgcttgtcgaaggaccaccaggaccagcaggacctgcaggtattatgggtcctccaggtctacaaggccccactggaccccctggtgaccctggcgataggggccccccaggacgtcctggcttaccaggggctgatggtctacctggtcctcctggtactatgttgatgttaccgttccgttatggtggtgatggttccaaaggaccaaccatctctgctcaggaagctcaggctcaagctattcttcagcaggctcggattgctctgagaggcccacctggcccaatgggtctaactggaagaccaggtcctgtgggggggcctggttcatctggggccaaaggtgagagtggtgatccaggtcctcagggccctcgaggcgtccagggtccccctggtccaacgggaaaacctggaaaaaggggtcgtccaggtgcagatggaggaagaggaatgccaggagaacctggggcaaagggagatcgagggtttgatggacttccgggtctgccaggtgacaaaggtcacaggggtgaacgaggtcctcaaggtcctccaggtcctcctggtgatgatggaatgaggggagaagatggagaaattggaccaagaggtcttccaggtgaagctggcccacgaggtttgctgggtccaaggggaactccaggagctccagggcagcctggtatggcaggtgtagatggccccccaggaccaaaagggaacatgggtccccaaggggagcctgggcctccaggtcaacaagggaatccaggacctcagggtcttcctggtccacaaggtccaattggtcctcctggtgaaaaaatgtgctgcaatctaagtttcggaatacttataccactccagaaataatcctcgtgttaatattcagtccatgtttccaccccctcagacctagctaacaattaatttgctttctgtctctgtagatttgagttttctgaatatttcatgtgaatgaaacttatgaataaatttatgatttaatcata

SEQ ID NO: 47 - DNA, 3475 bp, Homo sapiens
acacagtactctcagcttgttggtggaagcccctcatctgccttcattctgaaggcagggcccggcagaggaaggatcagagggtcgcggccggagggtcccggccggtggggccaactcagagggagaggaaagggctagagacacgaagaacgcaaaccatcaaatttagaagaaaaagccctttgactttttccccctctccctccccaatggctgtgtagcaaacatccctggcgataccttggaaaggacgaagttggtctgcagtcgcaatttcgtgggttgagttcacagttgtgagtgcggggctcggagatggagccgtggtcctctaggtggaaaacgaaacggtggctctgggatttcaccgtaacaaccctcgcattgaccttcctcttccaagctagagaggtcagaggagctgctccagttgatgtactaaaagcactagattttcacaattctccagagggaatatcaaaaacaacgggattttgcacaaacagaaagaattctaaaggctcagatactgcttacagagtttcaaagcaagcacaactcagtgccccaacaaaacagttatttccaggtggaactttcccagaagacttttcaatactatttacagtaaaaccaaaaaaaggaattcagtctttccttttatctatatataatgagcatggtattcagcaaattggtgttgaggttgggagatcacctgtttttctgtttgaagaccacactggaaaacctgccccagaagactatcccctcttcagaactgttaacatcgctgacgggaagtggcatcgggtagcaatcagcgtggagaagaaaactgtgacaatgattgttgattgtaagaagaaaaccacgaaaccacttgatagaagtgagagagcaattgttgataccaatggaatcacggtttttggaacaaggattttggatgaagaagtttttgagggggacattcagcagtttttgatcacaggtgatcccaaggcagcatatgactactgtgagcattatagtccagactgtgactcttcagcacccaaggctgctcaagctcaggaacctcagatagatgagtatgcaccagaggatataatcgaatatgactatgagtatggggaagcagagtataaagaggctgaaagtgtaacagagggacccactgtaactgaggagacaatagcacagacggaggcaaacatcgttgatgattttcaagaatacaactatggaacaatggaaagttaccagacagaagctcctaggcatgtttctgggacaaatgagccaaatccagttgaagaaatatttactgaagaatatctaacgggagaggattatgattcccagaggaaaaattctgaggatacactatatgaaaacaaagaaatagacggcagggattctgatcttctggtagatggagatttaggcgaatatgatttttatgaatataaagaatatgaagataaaccaacaagcccccctaatgaagaatttggtccaggtgtaccagcagaaactgatattacagaaacaagcataaatggccatggtgcatatggagagaaaggacagaaaggagaaccagcagtggttgagcctggtatgcttgtcgaaggaccaccaggaccagcaggacctgcaggtattatgggtcctccaggtctacaaggccccactggaccccctggtgaccctggcgataggggccccccaggacgtcctggcttaccaggggctgatggtctacctggtcctcctggtactatgttgatgttaccgttccgttatggtggtgatggttccaaaggaccaaccatctctgctcaggaagctcaggctcaagctattcttcagcaggctcggattgctctgagaggcccacctggcccaatgggtctaactggaagaccaggtcctgtgggggggcctggttcatctggggccaaaggtgagagtggtgatccaggtcctcagggccctcgaggcgtccagggtccccctggtccaacgggaaaacctggaaaaaggggtcgtccaggtgcagatggaggaagaggaatgccaggagaacctggggcaaagggagatcgagggtttgatggacttccgggtctgccaggtgacaaaggtcacaggggtgaacgaggtcctcaaggtcctccaggtcctcctggtgatgatggaatgaggggagaagatggagaaattggaccaagaggtcttccaggtgaagctggtatggcaggtgtagatggccccccaggaccaaaagggaacatgggtccccaaggggagcctgggcctccaggtcaacaagggaatccaggacctcagggtcttcctggtccacaaggtccaattggtcctcctggtgaaaaagtctccttttctttctcattattttacaaaaaagtaattaagtttgcttgtgacaaaagatttgtaggaagacatgatgaaaggaaagttgtgaagttgtcattgccattatatctcatatatgaatagcaaatgatgttcttgttaataactcaatgtctggatcaaaacaagaataaatctataattaaacacatgtctttttccctgatctccactgtgagattccttgagtaatattttgtcccctgtagtcatagcacatttctatctggctctttccaacaccttttttctttcattatttttgttgatttctacaaacatattaattaaaaaaaactaatagctttatcgaagtgtaatttaaatactataaatattcccttgttttaagtgtacaagtgaattatttttactaaatttacagatgtgctgcaatctaagtttcggaatacttataccactccagaaataatcctcgtgttaatattcagtccatgtttccaccccctcagacctagctaacaattaatttgctttctgtctctgtagatttgagttttctgaatatttcatgtgaatgaaacttatgaataaatttatgatttaatcatatgaatgtgtatgtgacctttatgtctgacttctttcattttaggttcatccatgctgtagcatacatatattagtactttgctccttattttgttctcatagtattccattgattgggtataccaggttctgtttacttttacttggcagttgatagaataggtgtagtttatactttttcgctattctccataccggtgctgtagtgaataattgcatacaagtctttgtatagatgtgttttcattctttttggtatatacttagaagcagaattcttgtgttatggtaaacttatattcaatattttgtgaattccactcttttccatatcgattgtaccattttcccttccaagtaaccatgtatgaggatagtcatttctgcacattctcactaatgcttgttattgtctgtcttcttgattacgatcattctcgttggtgtgaaa

SEQ ID NO: 48 - DNA, 1271 bp, Homo sapiens
acacagtactctcagcttgttggtggaagcccctcatctgccttcattctgaaggcagggcccggcagaggaaggatcagagggtcgcggccggagggtcccggccggtggggccaactcagagggagaggaaagggctagagacacgaagaacgcaaaccatcaaatttagaagaaaaagccctttgactttttccccctctccctccccaatggctgtgtagcaaacatccctggcgataccttggaaaggacgaagttggtctgcagtcgcaatttcgtgggttgagttcacagttgtgagtgcggggctcggagatggagccgtggtcctctaggtggaaaacgaaacggtggctctgggatttcaccgtaacaaccctcgcattgaccttcctcttccaagctagagaggtcagaggagctgctccagttgatgtactaaaagcactagattttcacaattctccagagggaatatcaaaaacaacgggattttgcacaaacagaaagaattctaaaggctcagatactgcttacagagtttcaaagcaagcacaactcagtgccccaacaaaacagttatttccaggtggaactttcccagaagacttttcaatactatttacagtaaaaccaaaaaaaggaattcagtctttccttttatctatatataatgagcatggtattcagcaaattggtgttgaggttgggagatcacctgtttttctgtttgaagaccacactggaaaacctgccccagaagactatcccctcttcagaactgttaacatcgctgacgggaagtggcatcgggtagcaatcagcgtggagaagaaaactgtgacaatgattgttgattgtaagaagaaaaccacgaaaccacttgatagaagtgagagagcaattgttgataccaatggaatcacggtttttggaacaaggattttggatgaagaagtttttgagggggacattcagcagtttttgatcacaggtgatcccaaggcagcatatgactactgtgagcattatagtccagactgtgactcttcagcacccaaggctgctcaagctcaggaacctcagatagatgaggtgaggagcacaagaccagagaaggtcttcgtatttcagtgatatggacatagcagtgcagtttttgaacttatacttatttattccattttaattaagctatgctttgtattttaattgtgttgtaatatttccaggaaaaagtgacttgaatatatttggtacttgttttc

SEQ ID NO: 49 - DNA, 2201 bp, Homo sapiens
tgagacaagatgtcactctgtcacccaggctggagtgcagtggcaggatcacggctcactgcagcctcgacctccctgggctcaggtgatcctcccacctcagcctaccgagtagctgggactacaggtgcatgtcaccatacccggttaatttttgtattttttttagagacaaggtctcaccatgttgcccaggctggtctcaaactcctgtgctcaggcaatgcgtcagcctcgacatctcaaagtgctgtgattacaggcgtgagccccgacacctggcctagttctattttctaaatgtgaattctgtaaagatatcttttaaaaataaagttctgtttttggtagaaaatgtaaaaatagataaatatggagggaagaaatcccccctggaatacagacgcttcctctcccttccagccttttccccatatgaacattgctgtgagtgagacttacatgcaatgtaatttctttttgagcttaacattacaacataaattctcaaactctgatgttcattaaacaccccagccccatcctgggaacttgggcttggggctcggggtgttctgataatgatcaaagtatgagaattgaacccatgaggactttgatccaagatactggggtgtggggaggggcaggcacaggtgtcctgggaacacactttgagaagcaatggcaaagctgggggtccagctaatgtgttacattagaatcacctcggggaggccctgggtgcccttctcagccctccctccggaggctgctgaagcccagcaaagccggagtcagagaacaatgtccgcctgagggcagggctgggctgggctggccttctggccctatctgctccgtgcccaacccagcgccccgcacagtcggagctttgtaaatacgaggtgactgtctgcctacaaactttgtaaacatcacttgaaatggccgcagggcattgcgacatggccataccactatttgtttgctattgaatttgtacttccctgccttacttttgctattgcaaaccatgctgtcactaaggtcttcatgcacacagttgtgtcttggtcagatgatatgtttctaccaattttaattgtgtttctttccacctggacacacagctctctggcccagggctgggtcatcagcacaccctgctgctgctgttcagatctgcatcctggtcccgcttggtcccacagtgagaacgctttgctatcacatgggcaggctctgagagccctgccggcctggccttctcaaagaagacctgagagcttgggacccaagcagagaggaagaacagggctcagggtgcttgctccatgctcgctccacacctggggctcaaccctggctttccccggctccctgtgtgacttcagggcaggtcccttgggccctctgggccttatcatcttcatctgtaacagggcgatgcctctgccgtgtctggtggtgttgaggagttcctgtttgtgtaagcagctagttcagtgccagcacgagatgggaggcccatgaagttagcagtgcacaaaaaatagagcaaagactggatgcatttcctgagaacaaccatcactgtaaagcactttacaaatccaaagacaacccccggcaaaaactcaaaatgaaactccctctcgcagagcacaattccaattcgctctaaaaacattacaagttagttcatgtcatgccagatagctgaaggcagctcacaagttcttaaggccaggaatgccatgtgtctgctatgcacagctggccctggccctgagcctgaatgacagcacaaaggtgacgcagatgtgggtgccctgctcctgcccagcagcagtgcttggtggaggctgaggccctgcacaggcaccctcactgctgaccttgagcctctctctcctctagagtggaaaagacaaggatgccgtggataaattgctcaaggacctggacgccaatggagatgcccaggtggacttcagtgagttcatcgtgttcgtggctgcaatcacgtctgcctgtcacaagtactttgagaaggcaggactcaaatgatgccctggagatgtcacagattcctggcagagccatggtcccaggcttcccaaaagtgtttgttggcaattattcccctaggctgagcctgctcatgtacctctgattaataaatgcttatgaaatga

SEQ ID NO: 50 - DNA, 3125 bp, Homo sapiens
gggtctcccacttgtccagacagcggccgggcttgtcacggggctctgtgcagccttttccactctcccggctgccagcgtcccgccccgtcccctcccagcccccaagggaggaggggagagctgcagagaggaggaggggtcggggaggcccggctttataaaggcggctggaacaaccctgcccgccagaccccgtcgcccggatcccctgagctgcccgccatcccacgtgaccgcgccgccccccagctccaccgctgagcccgctcgccatggccctcttcggggccctcttcctagcgctgctggcaggcgcacatgcagagttcccagggaggggctgcgctttctggagcaagagctggagactatcaccattccggacctgcggggcaaagaaggccacttctactacaacatctctgaggtgaaggtcacagagctgcaactgacatcttccgagctcgatttccagccacagcaggagctgatgcttcaaatcaccaatgcctccttggggctgcgcttccggagacagctgctctactggttcttctatgatgggggctacatcaacgcctcagctgagggtgtgtccatccgcactggtctggagctctcccgggatcccgctggacggatgaaagtgtccaatgtctcctgccaggcctctgtctccagaatgcacgcggccttcgggggaaccttcaagaaggtgtatgattttctctccacgttcatcacctcagggatgcgcttcctcctcaaccagcagatctgccctgtcctctaccacgcagggacggtcctgctcaactccctcctggacaccgtgcctgtgcgcagttctgtggacgagcttgttggcattgactattccctcatgaaggatcctgtggcttccaccagcaacctggacatggacttccggggggccttcttccccctgactgagaggaactggagcctccccaaccgggcagtggagccccagctgcaggaggaagagcggatggtgtatgtggccttctctgagttcttcttcgactctgccatggagagctacttccgggcgggggccctgcagctgttgctggtgggggacaaggtgccccacgacctggacatgctgctgagggccacctactttgggagcattgtcctgctgagcccagcagtgattgactccccattgaagctggagctgcgggtcctggccccaccgcgctgcaccatcaagccctctggcaccaccatctctgtcactgctagcgtcaccattgccctggtcccaccagaccagcctgaggtccagctgtccagcatgactatggacgcccgtctcagcgccaagatggctctccgggggaaggccctgcgcacgcagctggacctgcgcaggttccgaatctattccaaccattctgcactggagtcgctggctctgatcccattacaggcccctctgaagaccatgctgcagattggggtgatgcccatgctcaatgagcggacctggcgtggggtgcagatcccactacctgagggcatcaactttgtgcatgaggtggtgacgaaccatgcgggattcctcaccatcggggctgatctccactttgccaaagggctgcgagaggtgattgagaagaaccggcctgctgatgtcagggcgtccactgcccccacaccgtccacagcagctgtctgagccctcaatccccaagctggcagctgtcattcaggaccccaacccctctcagcccctcttttcccacattcatagcctgtagtgccccctctaacccccagtgccacagagaagacgggatttgaagctgtacccaatttaattccataatcaatctatcaattacagtccgtccaccacctccctgtgggctgtcctgagctctgttgggttcctgggatggaatcagtgcatcataaagggcattctttaagcagagaaggggccaggccaccccattcaggaactgctgcgggaataaagtgctaacttgcccccaggctgtctatgggagaccctgggcccagtctgggatgtacagggctctgggaagggggcagtcctggcggcagaacccggcctgcaggggcactttgcttagaagaggactctcctagcgggagaggctgggaggggctgcatcaggccgtggagctggttgctgtggtcatcagtatggctgcttgttcaggaagcgggagaacatggtgaaggcagcgaggggcttgtcggtgggaaccatgtggccggcgccctgaggagcaatgttcgtgagctcctgaccccaccattccctcctccccatataactgctcactcgggggcaattccttcatcccaaaccctttattcttcccagaaccctccccacccctctccaaaaaaacttgcccatacaggggccagatggtgacccatgacccagcctaaaaggcagccagagggaaaggacgggtgggtcctgctcctttgcctccggcccagttatctctcagcaggcccagtccctaccttgatcgtgagaaaggcgatgtgggagaactccttcacgaagccggcaatctgctccccgctgtccccgtacttcactaaccagggccggcgctgcacctccatctgccccaccaggaaagacatcagcctacagcagctgcatccttgctcacagctaccagcaagaccttagggctgggaattcctccacacttgccctctgtgggccagagccaggcagccagctggccactcccaggcatacccgctcccaatcctccacagcagcccctatcccagggccaggaatctctaccttaccttctggttgagggaatccacaaaccactcatcccccatgaaattgcaggccatgtctacatctccattatataataggatctggtatttctaaagcaggatggggtaaaaatgaggggtgtggaacaagcccagtccccagcccttccctagttcaaggcctacccctcaggaaattcaaggggccaagctagataacacgaaccagggaattttcatgttttctaacgacttactgcatgtccagtattctactaaatgttttatctgtgaaagtaga

SEQ ID NO: 51 - DNA, 3263 bp, Homo sapiens
gggtctcccacttgtccagacagcggccgggcttgtcacggggctctgtgcagccttttccactctcccggctgccagcgtcccgccccgtcccctcccagcccccaagggaggaggggagagctgcagagaggaggaggggtcggggaggcccggctttataaaggcggctggaacaaccctgcccgccagaccccgtcgcccggatcccctgagctgcccgccatcccacgtgaccgcgccgccccccagctccaccgctgagcccgctcgccatggccctcttcggggccctcttcctagcgctgctggcaggcgcacatgcagagttcccaggctgcaagatccgcgtcacctccaaggcgctggagctggtgaagcaggaggggctgcgctttctggagcaagagctggagactatcaccattccggacctgcggggcaaagaaggccacttctactacaacatctctgagcctggacttgaaaggggagcagacaaatttcctgtcgttgggggaagttccctcttcttggccctggatctgaccctgaggcctcctgtagggtgaaggtcacagagctgcaactgacatcttccgagctcgatttccagccacagcaggagctgatgcttcaaatcaccaatgcctccttggggctgcgcttccggagacagctgctctactggttcttctatgatgggggctacatcaacgcctcagctgagggtgtgtccatccgcactggtctggagctctcccgggatcccgctggacggatgaaagtgtccaatgtctcctgccaggcctctgtctccagaatgcacgcggccttcgggggaaccttcaagaaggtgtatgattttctctccacgttcatcacctcagggatgcgcttcctcctcaaccagcagatctgccctgtcctctaccacgcagggacggtcctgctcaactccctcctggacaccgtgcctgtgcgcagttctgtggacgagcttgttggcattgactattccctcatgaaggatcctgtggcttccaccagcaacctggacatggacttccggggggccttcttccccctgactgagaggaactggagcctccccaaccgggcagtggagccccagctgcaggaggaagagcggatggtgtatgtggccttctctgagttcttcttcgactctgccatggagagctacttccgggcgggggccctgcagctgttgctggtgggggacaaggtgccccacgacctggacatgctgctgagggccacctactttgggagcattgtcctgctgagcccagcagtgattgactccccattgaagctggagctgcgggtcctggccccaccgcgctgcaccatcaagccctctggcaccaccatctctgtcactgctagcgtcaccattgccctggtcccaccagaccagcctgaggtccagctgtccagcatgactatggacgcccgtctcagcgccaagatggctctccgggggaaggccctgcgcacgcagctggacctgcgcaggttccgaatctattccaaccattctgcactggagtcgctggctctgatcccattacaggcccctctgaagaccatgctgcagattggggtgatgcccatgctcaatgagcggacctggcgtggggtgcagatcccactacctgagggcatcaactttgtgcatgaggtggtgacgaaccatgcgggattcctcaccatcggggctgatctccactttgccaaagggctgcgagaggtgattgagaagaaccggcctgctgatgtcagggcgtccactgcccccacaccgtccacagcagctgtctgagccctcaatccccaagctggcagctgtcattcaggaccccaacccctctcagcccctcttttcccacattcatagcctgtagtgccccctctaacccccagtgccacagagaagacgggatttgaagctgtacccaatttaattccataatcaatctatcaattacagtccgtccaccacctccctgtgggctgtcctgagctctgttgggttcctgggatggaatcagtgcatcataaagggcattctttaagcagagaaggggccaggccaccccattcaggaactgctgcgggaataaagtgctaacttgcccccaggctgtctatgggagaccctgggcccagtctgggatgtacagggctctgggaagggggcagtcctggcggcagaacccggcctgcaggggcactttgcttagaagaggactctcctagcgggagaggctgggaggggctgcatcaggccgtggagctggttgctgtggtcatcagtatggctgcttgttcaggaagcgggagaacatggtgaaggcagcgaggggcttgtcggtgggaaccatgtggccggcgccctgaggagcaatgttcgtgagctcctgaccccaccattccctcctccccatataactgctcactcgggggcaattccttcatcccaaaccctttattcttcccagaaccctccccacccctctccaaaaaaacttgcccatacaggggccagatggtgacccatgacccagcctaaaaggcagccagagggaaaggacgggtgggtcctgctcctttgcctccggcccagttatctctcagcaggcccagtccctaccttgatcgtgagaaaggcgatgtgggagaactccttcacgaagccggcaatctgctccccgctgtccccgtacttcactaaccagggccggcgctgcacctccatctgccccaccaggaaagacatcagcctacagcagctgcatccttgctcacagctaccagcaagaccttagggctgggaattcctccacacttgccctctgtgggccagagccaggcagccagctggccactcccaggcatacccgctcccaatcctccacagcagcccctatcccagggccaggaatctctaccttaccttctggttgagggaatccacaaaccactcatcccccatgaaattgcaggccatgtctacatctccattatataataggatctggtatttctaaagcaggatggggtaaaaatgaggggtgtggaacaagcccagtccccagcccttccctagttcaaggcctacccctcaggaaattcaaggggccaagctagataacacgaaccagggaattttcatgttttctaacgacttactgcatgtccagtattctactaaatgttttatctgtgaaagtaga

SEQ ID NO: 52 - DNA, 3256 bp, Homo sapiens
gggtctcccacttgtccagacagcggccgggcttgtcacggggctctgtgcagccttttccactctcccggctgccagcgtcccgccccgtcccctcccagcccccaagggaggaggggagagctgcagagaggaggaggggtcggggaggcccggctttataaaggcggctggaacaaccctgcccgccagaccccgtcgcccggatcccctgagctgcccgccatcccacgtgaccgcgccgccccccagctccaccgctgagcccgctcgccatggccctcttcggggccctcttcctagcgctgctggcaggcgcacatgcagagttcccaggctgcaagatccgcgtcacctccaaggcgctggagctggtgaagcaggaggggctgcgctttctggagcaagagctggagactatcaccattccggacctgcggggcaaagaaggccacttctactacaacatctctgaggtgaaggtcacagagctgcaactgacatcttccgagctcgatttccagccacagcaggagctgatgcttcaaatcaccaatgcctccttggggctgcgcttccggagacagctgctctactggttcttctatgatgggggctacatcaacgcctcagctgagggtgtgtccatccgcactggtctggagctctcccgggatcccgctggacggatgaaagtgtccaatgtctcctgccaggcctctgtctccagaatgcacgcggccttcgggggaaccttcaagaaggtgtatgattttctctccacgttcatcacctcagggatgcgcttcctcctcaaccagcaggtgtgggcagcgacaggtcgcagggtggcaagggtgggcatgctctcactttgagaaggccctgactctggctcccacctcgcagatctgccctgtcctctaccacgcagggacggtcctgctcaactccctcctggacaccgtgcctgtgcgcagttctgtggacgagcttgttggcattgactattccctcatgaaggatcctgtggcttccaccagcaacctggacatggacttccggggggccttcttccccctgactgagaggaactggagcctccccaaccgggcagtggagccccagctgcaggaggaagagcggatggtgtatgtggccttctctgagttcttcttcgactctgccatggagagctacttccgggcgggggccctgcagctgttgctggtgggggacaaggtgccccacgacctggacatgctgctgagggccacctactttgggagcattgtcctgctgagcccagcagtgattgactccccattgaagctggagctgcgggtcctggccccaccgcgctgcaccatcaagccctctggcaccaccatctctgtcactgctagcgtcaccattgccctggtcccaccagaccagcctgaggtccagctgtccagcatgactatggacgcccgtctcagcgccaagatggctctccgggggaaggccctgcgcacgcagctggacctgcgcaggttccgaatctattccaaccattctgcactggagtcgctggctctgatcccattacaggcccctctgaagaccatgctgcagattggggtgatgcccatgctcaatgagcggacctggcgtggggtgcagatcccactacctgagggcatcaactttgtgcatgaggtggtgacgaaccatgcgggattcctcaccatcggggctgatctccactttgccaaagggctgcgagaggtgattgagaagaaccggcctgctgatgtcagggcgtccactgcccccacaccgtccacagcagctgtctgagccctcaatccccaagctggcagctgtcattcaggaccccaacccctctcagcccctcttttcccacattcatagcctgtagtgccccctctaacccccagtgccacagagaagacgggatttgaagctgtacccaatttaattccataatcaatctatcaattacagtccgtccaccacctccctgtgggctgtcctgagctctgttgggttcctgggatggaatcagtgcatcataaagggcattctttaagcagagaaggggccaggccaccccattcaggaactgctgcgggaataaagtgctaacttgcccccaggctgtctatgggagaccctgggcccagtctgggatgtacagggctctgggaagggggcagtcctggcggcagaacccggcctgcaggggcactttgcttagaagaggactctcctagcgggagaggctgggaggggctgcatcaggccgtggagctggttgctgtggtcatcagtatggctgcttgttcaggaagcgggagaacatggtgaaggcagcgaggggcttgtcggtgggaaccatgtggccggcgccctgaggagcaatgttcgtgagctcctgaccccaccattccctcctccccatataactgctcactcgggggcaattccttcatcccaaaccctttattcttcccagaaccctccccacccctctccaaaaaaacttgcccatacaggggccagatggtgacccatgacccagcctaaaaggcagccagagggaaaggacgggtgggtcctgctcctttgcctccggcccagttatctctcagcaggcccagtccctaccttgatcgtgagaaaggcgatgtgggagaactccttcacgaagccggcaatctgctccccgctgtccccgtacttcactaaccagggccggcgctgcacctccatctgccccaccaggaaagacatcagcctacagcagctgcatccttgctcacagctaccagcaagaccttagggctgggaattcctccacacttgccctctgtgggccagagccaggcagccagctggccactcccaggcatacccgctcccaatcctccacagcagcccctatcccagggccaggaatctctaccttaccttctggttgagggaatccacaaaccactcatcccccatgaaattgcaggccatgtctacatctccattatataataggatctggtatttctaaagcaggatggggtaaaaatgaggggtgtggaacaagcccagtccccagcccttccctagttcaaggcctacccctcaggaaattcaaggggccaagctagataacacgaaccagggaattttcatgttttctaacgacttactgcatgtccagtattctactaaatgttttatctgtgaaagtaga

SEQ ID NO: 53 - DNA, 3164 bp, Homo sapiens
gggtctcccacttgtccagacagcggccgggcttgtcacggggctctgtgcagccttttccactctcccggctgccagcgtcccgccccgtcccctcccagcccccaagggaggaggggagagctgcagagaggaggaggggtcggggaggcccggctttataaaggcggctggaacaaccctgcccgccagaccccgtcgcccggatcccctgagctgcccgccatcccacgtgaccgcgccgccccccagctccaccgctgagcccgctcgccatggccctcttcggggccctcttcctagcgctgctggcaggcgcacatgcagagttcccaggctgcaagatccgcgtcacctccaaggcgctggagctggtgaagcaggaggggctgcgctttctggagcaagagctggagactatcaccattccggacctgcggggcaaagaaggccacttctactacaacatctctgaggtgaaggtcacagagctgcaactgacatcttccgagctcgatttccagccacagcaggagctgatgcttcaaatcaccaatgcctccttggggctgcgcttccggagacagctgctctactggttcttctatgatgggggctacatcaacgcctcagctgagggtgtgtccatccgcactggtctggagctctcccgggatcccgctggacggatgaaagtgtccaatgtctcctgccaggcctctgtctccagaatgcacgcggccttcgggggaaccttcaagaaggtgtatgattttctctccacgttcatcacctcagggatgcgcttcctcctcaaccagcagatctgccctgtcctctaccacgcagggacggtcctgctcaactccctcctggacaccgtgcctgttctgtggacgagcttgttggcattgactattccctcatgaaggatcctgtggcttccaccagcaacctggacatggacttccggggggccttcttccccctgactgagaggaactggagcctccccaaccgggcagtggagccccagctgcaggaggaagagcggatggtgtatgtggccttctctgagttcttcttcgactctgccatggagagctacttccgggcgggggccctgcagctgttgctggtgggggacaaggtgccccacgacctggacatgctgctgagggccacctactttgggagcattgtcctgctgagcccagcagtgattgactccccattgaagctggagctgcgggtcctggccccaccgcgctgcaccatcaagccctctggcaccaccatctctgtcactgctagcgtcaccattgccctggtcccaccagaccagcctgaggtccagctgtccagcatgactatggacgcccgtctcagcgccaagatggctctccgggggaaggccctgcgcacgcagctggacctgcgcaggttccgaatctattccaaccattctgcactggagtcgctggctctgatcccattacaggcccctctgaagaccatgctgcagattggggtgatgcccatgctcaatgagcggacctggcgtggggtgcagatcccactacctgagggcatcaactttgtgcatgaggtggtgacgaaccatgcgggattcctcaccatcggggctgatctccactttgccaaagggctgcgagaggtgattgagaagaaccggcctgctgatgtcagggcgtccactgcccccacaccgtccacagcagctgtctgagccctcaatccccaagctggcagctgtcattcaggaccccaacccctctcagcccctcttttcccacattcatagcctgtagtgccccctctaacccccagtgccacagagaagacgggatttgaagctgtacccaatttaattccataatcaatctatcaattacagtccgtccaccacctccctgtgggctgtcctgagctctgttgggttcctgggatggaatcagtgcatcataaagggcattctttaagcagagaaggggccaggccaccccattcaggaactgctgcgggaataaagtgctaacttgcccccaggctgtctatgggagaccctgggcccagtctgggatgtacagggctctgggaagggggcagtcctggcggcagaacccggcctgcaggggcactttgcttagaagaggactctcctagcgggagaggctgggaggggctgcatcaggccgtggagctggttgctgtggtcatcagtatggctgcttgttcaggaagcgggagaacatggtgaaggcagcgaggggcttgtcggtgggaaccatgtggccggcgccctgaggagcaatgttcgtgagctcctgaccccaccattccctcctccccatataactgctcactcgggggcaattccttcatcccaaaccctttattcttcccagaaccctccccacccctctccaaaaaaacttgcccatacaggggccagatggtgacccatgacccagcctaaaaggcagccagagggaaaggacgggtgggtcctgctcctttgcctccggcccagttatctctcagcaggcccagtccctaccttgatcgtgagaaaggcgatgtgggagaactccttcacgaagccggcaatctgctccccgctgtccccgtacttcactaaccagggccggcgctgcacctccatctgccccaccaggaaagacatcagcctacagcagctgcatccttgctcacagctaccagcaagaccttagggctgggaattcctccacacttgccctctgtgggccagagccaggcagccagctggccactcccaggcatacccgctcccaatcctccacagcagcccctatcccagggccaggaatctctaccttaccttctggttgagggaatccacaaaccactcatcccccatgaaattgcaggccatgtctacatctccattatataataggatctggtatttctaaagcaggatggggtaaaaatgaggggtgtggaacaagcccagtccccagcccttccctagttcaaggcctacccctcaggaaattcaaggggccaagctagataacacgaaccagggaattttcatgttttctaacgacttactgcatgtccagtattctactaaatgttttatctgtgaaagtaga

SEQ ID NO: 54 - DNA, 2886 bp, Homo sapiens
gggtctcccacttgtccagacagcggccgggcttgtcacggggctctgtgcagccttttccactctcccggctgccagcgtcccgccccgtcccctcccagcccccaagggaggaggggagagctgcagagaggaggaggggtcggggaggcccggctttataaaggcggctggaacaaccctgcccgccagaccccgtcgcccggatcccctgagctgcccgccatcccacgtgaccgcgccgccccccagctccaccgctgagcccgctcgccatggccctcttcggggccctcttcctagcgctgctggcaggcgcacatgcagagttcccaggctgcaagatccgcgtcacctccaaggcgctggagctggtgaagcaggaggggctgcgctttctggagcaagagctggagactatcaccattccggacctgcggggcaaagaaggccacttctactacaacatctctgagaaggtgtatgattttctctccacgttcatcacctcagggatgcgcttcctcctcaaccagcagatctgccctgtcctctaccacgcagggacggtcctgctcaactccctcctggacaccgtgcctgtgcgcagttctgtggacgagcttgttggcattgactattccctcatgaaggatcctgtggcttccaccagcaacctggacatggacttccggggggccttcttccccctgactgagaggaactggagcctccccaaccgggcagtggagccccagctgcaggaggaagagcggatggtgtatgtggccttctctgagttcttcttcgactctgccatggagagctacttccgggcgggggccctgcagctgttgctggtgggggacaaggtgccccacgacctggacatgctgctgagggccacctactttgggagcattgtcctgctgagcccagcagtgattgactccccattgaagctggagctgcgggtcctggccccaccgcgctgcaccatcaagccctctggcaccaccatctctgtcactgctagcgtcaccattgccctggtcccaccagaccagcctgaggtccagctgtccagcatgactatggacgcccgtctcagcgccaagatggctctccgggggaaggccctgcgcacgcagctggacctgcgcaggttccgaatctattccaaccattctgcactggagtcgctggctctgatcccattacaggcccctctgaagaccatgctgcagattggggtgatgcccatgctcaatgagcggacctggcgtggggtgcagatcccactacctgagggcatcaactttgtgcatgaggtggtgacgaaccatgcgggattcctcaccatcggggctgatctccactttgccaaagggctgcgagaggtgattgagaagaaccggcctgctgatgtcagggcgtccactgcccccacaccgtccacagcagctgtctgagccctcaatccccaagctggcagctgtcattcaggaccccaacccctctcagcccctcttttcccacattcatagcctgtagtgccccctctaacccccagtgccacagagaagacgggatttgaagctgtacccaatttaattccataatcaatctatcaattacagtccgtccaccacctccctgtgggctgtcctgagctctgttgggttcctgggatggaatcagtgcatcataaagggcattctttaagcagagaaggggccaggccaccccattcaggaactgctgcgggaataaagtgctaacttgcccccaggctgtctatgggagaccctgggcccagtctgggatgtacagggctctgggaagggggcagtcctggcggcagaacccggcctgcaggggcactttgcttagaagaggactctcctagcgggagaggctgggaggggctgcatcaggccgtggagctggttgctgtggtcatcagtatggctgcttgttcaggaagcgggagaacatggtgaaggcagcgaggggcttgtcggtgggaaccatgtggccggcgccctgaggagcaatgttcgtgagctcctgaccccaccattccctcctccccatataactgctcactcgggggcaattccttcatcccaaaccctttattcttcccagaaccctccccacccctctccaaaaaaacttgcccatacaggggccagatggtgacccatgacccagcctaaaaggcagccagagggaaaggacgggtgggtcctgctcctttgcctccggcccagttatctctcagcaggcccagtccctaccttgatcgtgagaaaggcgatgtgggagaactccttcacgaagccggcaatctgctccccgctgtccccgtacttcactaaccagggccggcgctgcacctccatctgccccaccaggaaagacatcagcctacagcagctgcatccttgctcacagctaccagcaagaccttagggctgggaattcctccacacttgccctctgtgggccagagccaggcagccagctggccactcccaggcatacccgctcccaatcctccacagcagcccctatcccagggccaggaatctctaccttaccttctggttgagggaatccacaaaccactcatcccccatgaaattgcaggccatgtctacatctccattatataataggatctggtatttctaaagcaggatggggtaaaaatgaggggtgtggaacaagcccagtccccagcccttccctagttcaaggcctacccctcaggaaattcaaggggccaagctagataacacgaaccagggaattttcatgttttctaacgacttactgcatgtccagtattctactaaatgttttatctgtgaaagtaga

SEQ ID NO: 55 - DNA, 3100 bp, Homo sapiens
gggtctcccacttgtccagacagcggccgggcttgtcacggggctctgtgcagccttttccactctcccggctgccagcgtcccgccccgtcccctcccagcccccaagggaggaggggagagctgcagagaggaggaggggtcggggaggcccggctttataaaggcggctggaacaaccctgcccgccagaccccgtcgcccggatcccctgagctgcccgccatcccacgtgaccgcgccgccccccagctccaccgctgagcccgctcgccatggccctcttcggggccctcttcctagcgctgctggcaggcgcacatgcagagttcccaggctgcaagatccgcgtcacctccaaggcgctggagctggtgaagcaggaggggctgcgctttctggagcaagagctggagactatcaccattccggacctgcggggcaaagaaggccacttctactacaacatctctgaggtgaaggtcacagagctgcaactgacatcttccgagctcgatttccagccacagcaggagctgatgcttcaaatcaccaatgcctccttggggctgcgcttccggagacagctgctctactggttcttgaaggtgtatgattttctctccacgttcatcacctcagggatgcgcttcctcctcaaccagcaggtgtgggcagcgacaggtcgcagggtggcaagggtgggcatgctctcactttgagaaggccctgactctggctcccacctcgcagatctgccctgtcctctaccacgcagggacggtcctgctcaactccctcctggacaccgtgcctgtgcgcagttctgtggacgagcttgttggcattgactattccctcatgaaggatcctgtggcttccaccagcaacctggacatggacttccggggggccttcttccccctgactgagaggaactggagcctccccaaccgggcagtggagccccagctgcaggaggaagagcggatggtgtatgtggccttctctgagttcttcttcgactctgccatggagagctacttccgggcgggggccctgcagctgttgctggtgggggacaaggtgccccacgacctggacatgctgctgagggccacctactttgggagcattgtcctgctgagcccagcagtgattgactccccattgaagctggagctgcgggtcctggccccaccgcgctgcaccatcaagccctctggcaccaccatctctgtcactgctagcgtcaccattgccctggtcccaccagaccagcctgaggtccagctgtccagcatgactatggacgcccgtctcagcgccaagatggctctccgggggaaggccctgcgcacgcagctggacctgcgcaggttccgaatctattccaaccattctgcactggagtcgctggctctgatcccattacaggcccctctgaagaccatgctgcagattggggtgatgcccatgctcaatgagcggacctggcgtggggtgcagatcccactacctgagggcatcaactttgtgcatgaggtggtgacgaaccatgcgggattcctcaccatcggggctgatctccactttgccaaagggctgcgagaggtgattgagaagaaccggcctgctgatgtcagggcgtccactgcccccacaccgtccacagcagctgtctgagccctcaatccccaagctggcagctgtcattcaggaccccaacccctctcagcccctcttttcccacattcatagcctgtagtgccccctctaacccccagtgccacagagaagacgggatttgaagctgtacccaatttaattccataatcaatctatcaattacagtccgtccaccacctccctgtgggctgtcctgagctctgttgggttcctgggatggaatcagtgcatcataaagggcattctttaagcagagaaggggccaggccaccccattcaggaactgctgcgggaataaagtgctaacttgcccccaggctgtctatgggagaccctgggcccagtctgggatgtacagggctctgggaagggggcagtcctggcggcagaacccggcctgcaggggcactttgcttagaagaggactctcctagcgggagaggctgggaggggctgcatcaggccgtggagctggttgctgtggtcatcagtatggctgcttgttcaggaagcgggagaacatggtgaaggcagcgaggggcttgtcggtgggaaccatgtggccggcgccctgaggagcaatgttcgtgagctcctgaccccaccattccctcctccccatataactgctcactcgggggcaattccttcatcccaaaccctttattcttcccagaaccctccccacccctctccaaaaaaacttgcccatacaggggccagatggtgacccatgacccagcctaaaaggcagccagagggaaaggacgggtgggtcctgctcctttgcctccggcccagttatctctcagcaggcccagtccctaccttgatcgtgagaaaggcgatgtgggagaactccttcacgaagccggcaatctgctccccgctgtccccgtacttcactaaccagggccggcgctgcacctccatctgccccaccaggaaagacatcagcctacagcagctgcatccttgctcacagctaccagcaagaccttagggctgggaattcctccacacttgccctctgtgggccagagccaggcagccagctggccactcccaggcatacccgctcccaatcctccacagcagcccctatcccagggccaggaatctctaccttaccttctggttgagggaatccacaaaccactcatcccccatgaaattgcaggccatgtctacatctccattatataataggatctggtatttctaaagcaggatggggtaaaaatgaggggtgtggaacaagcccagtccccagcccttccctagttcaaggcctacccctcaggaaattcaaggggccaagctagataacacgaaccagggaattttcatgttttctaacgacttactgcatgtccagtattctactaaatgttttatctgtgaaagtaga

SEQ ID NO: 56 - DNA, 3254 bp, Homo sapiens
gggtctcccacttgtccagacagcggccgggcttgtcacggggctctgtgcagccttttccactctcccggctgccagcgtcccgccccgtcccctcccagcccccaagggaggaggggagagctgcagagaggaggaggggtcggggaggcccggctttataaaggcggctggaacaaccctgcccgccagaccccgtcgcccggatcccctgagctgcccgccatcccacgtgaccgcgccgccccccagctccaccgctgagcccgctcgccatggccctcttcggggccctcttcctagcgctgctggcaggcgcacatgcagagttcccaggctgcaagatccgcgtcacctccaaggcgctggagctggtgaagcaggaggggctgcgctttctggagcaagagctggagactatcaccattccggacctgcggggcaaagaaggccacttctactacaacatctctgaggtgaaggtcacagagctgcaactgacatcttccgagctcgatttccagccacagcaggagctgatgcttcaaatcaccaatgcctccttggggctgcgcttccggagacagctgctctactggttcttctatgatgggggctacatcaacgcctcagctgagggtgtgtccatccgcactggtctggagctctcccgggatcccgctggacggatgaaagtgtccaatgtctcctgccaggcctctgtctccagaatgcacgcggccttcgggggaaccttcaagaaggtgtatgattttctctccacgttcatcacctcagggatgcgcttcctcctcaaccagcagatctgccctgtcctctaccacgcagggacggtcctgctcaactccctcctggacaccgtgcctgtgcgcagttctgtggacgagcttgttggcattgactattccctcatgaaggatcctgtggcttccaccagcaacctggacatggacttccggggggccttcttccccctgactgagaggaactggagcctccccaaccgggcagtggagccccagctgcaggaggaagagcggatggtgtatgtggccttctctgagttcttcttcgactctgccatggagagctacttccgggcgggggccctgcagctgttgctggtgggggacaaggtgccccacgacctggacatgctgctgagggccacctactttgggagcattgtcctgctgagcccagcagtgattgactccccattgaagctggagctgcgggtcctggccccaccgcgctgcaccatcaagccctctggcaccaccatctctgtcactgctagcgtcaccattgccctggtcccaccagaccagcctgaggtccagctgtccagcatgactatggacgcccgtctcagcgccaagatggctctccgggggaaggccctgcgcacgcagctggacctgcgcaggttccgaatctattccaaccattctgcactggagtcgctggctctgatcccattacaggcccctctgaagaccatgctgcagattggggtgatgcccatgctcaatggtaaggctggggtgtgaggatggaggaagaaaggaggggtgaactgggcgggcccagactgagcggggtgctcccacccacagagcggacctggcgtggggtgcagatcccactacctgagggcatcaactttgtgcatgaggtggtgacgaaccatgcgggattcctcaccatcggggctgatctccactttgccaaagggctgcgagaggtgattgagaagaaccggcctgctgatgtcagggcgtccactgcccccacaccgtccacagcagctgtctgagccctcaatccccaagctggcagctgtcattcaggaccccaacccctctcagcccctcttttcccacattcatagcctgtagtgccccctctaacccccagtgccacagagaagacgggatttgaagctgtacccaatttaattccataatcaatctatcaattacagtccgtccaccacctccctgtgggctgtcctgagctctgttgggttcctgggatggaatcagtgcatcataaagggcattctttaagcagagaaggggccaggccaccccattcaggaactgctgcgggaataaagtgctaacttgcccccaggctgtctatgggagaccctgggcccagtctgggatgtacagggctctgggaagggggcagtcctggcggcagaacccggcctgcaggggcactttgcttagaagaggactctcctagcgggagaggctgggaggggctgcatcaggccgtggagctggttgctgtggtcatcagtatggctgcttgttcaggaagcgggagaacatggtgaaggcagcgaggggcttgtcggtgggaaccatgtggccggcgccctgaggagcaatgttcgtgagctcctgaccccaccattccctcctccccatataactgctcactcgggggcaattccttcatcccaaaccctttattcttcccagaaccctccccacccctctccaaaaaaacttgcccatacaggggccagatggtgacccatgacccagcctaaaaggcagccagagggaaaggacgggtgggtcctgctcctttgcctccggcccagttatctctcagcaggcccagtccctaccttgatcgtgagaaaggcgatgtgggagaactccttcacgaagccggcaatctgctccccgctgtccccgtacttcactaaccagggccggcgctgcacctccatctgccccaccaggaaagacatcagcctacagcagctgcatccttgctcacagctaccagcaagaccttagggctgggaattcctccacacttgccctctgtgggccagagccaggcagccagctggccactcccaggcatacccgctcccaatcctccacagcagcccctatcccagggccaggaatctctaccttaccttctggttgagggaatccacaaaccactcatcccccatgaaattgcaggccatgtctacatctccattatataataggatctggtatttctaaagcaggatggggtaaaaatgaggggtgtggaacaagcccagtccccagcccttccctagttcaaggcctacccctcaggaaattcaaggggccaagctagataacacgaaccagggaattttcatgttttctaacgacttactgcatgtccagtattctactaaatgttttatctgtgaaagtaga

SEQ ID NO: 57 - DNA, 1437 bp, Homo sapiens
agtacatccgggggagcggaactgcaagaggaaaggctcgggtaggcttctgggagcgaccgctccgctcgtctcgttggttccggaggtcgctgcggcggtgggaaatgctggcgcgcgcggcgcggggcactggggcccttttgctgaggggctctctactggcttctggccgcgctccgcgccgcgcctcctctggattgccccgaaacaccgtggtactgttcgtgccgcagcaggaggcctgggtggtggagcgaatgggccgattccaccggatcctggagcctggtttgaacatcctcatccctgtgttagaccggatccgatatgtgcagagtctcaaggaaattgtcatcaacgtgcctgagcagtcggctgtgactctcgacaatgtaactctgcaaatcgatggagtcctttacctgcgcatcatggacccttacaaggcaagctacggtgtggaggaccctgagtatgccgtcacccagctagctcaaacaaccatgagatcagagctcggcaaactctctctggacaaagtcttccgggaacgggagtccctgaatgccagcattgtggatgccatcaaccaagctgctgactgctggggtatccgctgcctccgttatgagatcaaggatatccatgtgccaccccgggtgaaagagtctatgcagatgcaggtggaggcagagcggcggaaacgggccacagttctagagtctgaggggacccgagagtcggccatcaatgtggcagaagggaagaaacaggcccagatcctggcctccgaagcagaaaaggctgaacagataaatcaggcagcaggagaggccagtgcagttctggcgaaggccaaggctaaagctgaagctattcgaatcctggctgcagctctgacacaacataatggagatgcagcagcttcactgactgtggccgagcagtatgtcagcgcgttctccaaactggccaaggactccaacactatcctactgccctccaaccctggcgatgtcaccagcatggtggctcaggccatgggtgtatatggagccctcaccaaagccccagtgccagggactccagactcactctccagtgggagcagcagagatgtccagggtacagatgcaagtcttgatgaggaacttgatcgagtcaagatgagttagtggagctgggcttggccagggagtctggggacaaggaagcagattttcctgattctggctctagcttccctgccaagattttggtttttatttttttatttgaactttagtcgtgtaataaactcaccagtggcaaaccaaaaaaaaaaatctttgattggggaatgaagttgggaaagtcactagcattttccttggatccagtcctgtcagcatgatgcctccatgaataagagtgaacttcttgtaaagtgaaact

SEQ ID NO: 58 - DNA, 1745 bp, Homo sapiens
agtacatccgggggagcggaactgcaagaggaaaggctcgggtaggcttctgggagcgaccgctccgctcgtctcgttggttccggaggtcgctgcggcggtgggaaatgctggcgcgcgcggcgcggggcactggggcccttttgctgaggggctctctactggcttctggccgcgctccgcgccgcgcctcctctggattgccccgaaacaccgtggtactgttcgtgccgcagcaggaggcctgggtggtggagcgaatgggccgattccaccggatcctggagcctggtttgaacatcctcatccctgtgttagaccggatccgatatgtgcagagtctcaaggaaattgtcatcaacgtgcctgagcagtcggctgtgactctcgacaatgtaactctgcaaatcgatggagtcctttacctgcgcatcatggacccttacaaggcaagctacggtgtggaggaccctgagtatgccgtcacccagctagctcaaacaaccatgagatcagagctcggcaaactctctctggacaaagtcttccgggaacgggagtccctgaatgccagcattgtggatgccatcaaccaagctgctgactgctggggtatccgctgcctccgttatgagatcaaggatatccatgtgccaccccgggtgaaagagtctatgcagatgcaggtggaggcagagcggcggaaacgggccacagttctagagtctgaggggacccgagagtcggccatcaatgtggcagaagggaagaaacaggcccagatcctggcctccgaagcagaaaaggctgaacagataaatcaggcagcaggagaggccagtgcagttctggcgaaggccaaggctaaagctgaagctattcgaatcctggctgcagctctgacacaacataatggagatgcagcagcttcactgactgtggccgagcagtatgtcagcgcgttctccaaactggccaaggactccaacactatcctactgccctccaaccctggcgatgtcaccagcatggtggctcaggttagagctctctgaggacccagcacagagcactggtgccagggaccaaactgagaccccaccaccgtcatcaacacttacataccataaaggtcttcagagtgccttggccctagacctcccttcgttctttgtagagatggaatctaagaatgaaacatctccactcagtcctgcaaatatggaagttcttgagatacctttttttggtagatacttgtgctggtattctgagagtcactttactctgatggtttgcaagattcctaaaatcaactccagagcttacaagacaggtttgagagagggagaaaggaaaaccaacttactggcccccatgccatcttttcccgtttagccattggtaggctgggctgcacctctgtcaagtgtcctcatggtattctctctgttcctctcctcaggccatgggtgtatatggagccctcaccaaagccccagtgccagggactccagactcactctccagtgggagcagcagagatgtccagggtacagatgcaagtcttgatgaggaacttgatcgagtcaagatgagttagtggagctgggcttggccagggagtctggggacaaggaagcagattttcctgattctggctctagcttccctgccaagattttggtttttatttttttatttgaactttagtcgtgtaataaactcaccagtggcaaaccaaa

SEQ ID NO: 59 - DNA, 2037 bp, Homo sapiens
agtacatccgggggagcggaactgcaagaggaaaggctcgggtaggcttctgggagcgaccgctccgctcgtctcgttggttccggaggtcgctgcggcggtgggaaatgctggcgcgcgcggcgcggggcactggggcccttttgctgagggtgagagcgaggcaacctttccagagggtcaggacagagattacctgggttctccgctggaaaagagcgaaattccaacttttggagaggactggggtcagaggtcatggtccccatgtgattctccgaggatcctgagggtcgtggtttatggagatgccttcaggaccgaggggcggcgtgtctggccagatgggatctctgctcaccctcttctttccttcagggctctctactggcttctggccgcgctccgcgccgcgcctcctctggattgccccgaaacaccgtggtactgttcgtgccgcagcaggaggcctgggtggtggagcgaatgggccgattccaccggatcctggagcctgtgagaaacctcttctgcccaccctgggccagccagatgaccaatccctcacgacatgcaatgtcgggaggacttcctttgggcctgcccgcactgttagctcccgactctgtaggccagacctgacagggcccaggctgctgaccatcatccccatgttaccaccttttcctatgcatctcacaggccccattcttgggaatctcccctgcccactctcagccctacctctcagtctgcatagagatggctattctgctggctccgattctcatgactctcccctccattcaggggcctagtcttgcattcctgttctcttgggttttcttaccagtgacacctcagccttctgaggacttatttcttggtaggagctgctgcttttctgggcatgttccatgtgttgactccctacatactccaggactagcttaggtcccaacccaatagttcccagccttctgaggacccatgactcctctttccagggtttgaacatcctcatccctgtgttagaccggatccgatatgtgcagagtctcaaggaaattgtcatcaacgtgcctgagcagtcggctgtgactctcgacaatgtaactctgcaaatcgatggagtcctttacctgcgcatcatggacccttacaaggcaagctacggtgtggaggaccctgagtatgccgtcacccagctagctcaaacaaccatgagatcagagctcggcaaactctctctggacaaagtcttccgggaacgggagtccctgaatgccagcattgtggatgccatcaaccaagctgctgactgctggggtatccgctgcctccgttatgagatcaaggatatccatgtgccaccccgggtgaaagagtctatgcagatgcaggtggaggcagagcggcggaaacgggccacagttctagagtctgaggggacccgagagtcggccatcaatgtggcagaagggaagaaacaggcccagatcctggcctccgaagcagaaaaggctgaacagataaatcaggcagcaggagaggccagtgcagttctggcgaaggccaaggctaaagctgaagctattcgaatcctggctgcagctctgacacaacataatggagatgcagcagcttcactgactgtggccgagcagtatgtcagcgcgttctccaaactggccaaggactccaacactatcctactgccctccaaccctggcgatgtcaccagcatggtggctcaggccatgggtgtatatggagccctcaccaaagccccagtgccagggactccagactcactctccagtgggagcagcagagatgtccagggtacagatgcaagtcttgatgaggaacttgatcgagtcaagatgagttagtggagctgggcttggccagggagtctggggacaaggaagcagattttcctgattctggctctagcttccctgccaagattttggtttttatttttttatttgaactttagtcgtgtaataaactcaccagtggcaaaccaaa

SEQ ID NO: 60 - DNA, 1811 bp, Homo sapiens
agtacatccgggggagcggaactgcaagaggaaaggctcgggtaggcttctgggagcgaccgctccgctcgtctcgttggttccggaggtcgctgcggcggtgggaaatgctggcgcgcgcggcgcggggcactggggcccttttgctgaggggctctctactggcttctggccgcgctccgcgccgcgcctcctctggattgccccgaaacaccgtggtactgttcgtgccgcagcaggaggcctgggtggtggagcgaatgggccgattccaccggatcctggagcctgtgagaaacctcttctgcccaccctgggccagccagatgaccaatccctcacgacatgcaatgtcgggaggacttcctttgggcctgcccgcactgttagctcccgactctgtaggccagacctgacagggcccaggctgctgaccatcatccccatgttaccaccttttcctatgcatctcacaggccccattcttgggaatctcccctgcccactctcagccctacctctcagtctgcatagagatggctattctgctggctccgattctcatgactctcccctccattcaggggcctagtcttgcattcctgttctcttgggttttcttaccagtgacacctcagccttctgaggacttatttcttggtaggagctgctgcttttctgggcatgttccatgtgttgactccctacatactccaggactagcttaggtcccaacccaatagttcccagccttctgaggacccatgactcctctttccagggtttgaacatcctcatccctgtgttagaccggatccgatatgtgcagagtctcaaggaaattgtcatcaacgtgcctgagcagtcggctgtgactctcgacaatgtaactctgcaaatcgatggagtcctttacctgcgcatcatggacccttacaaggcaagctacggtgtggaggaccctgagtatgccgtcacccagctagctcaaacaaccatgagatcagagctcggcaaactctctctggacaaagtcttccgggaacgggagtccctgaatgccagcattgtggatgccatcaaccaagctgctgactgctggggtatccgctgcctccgttatgagatcaaggatatccatgtgccaccccgggtgaaagagtctatgcagatgcaggtggaggcagagcggcggaaacgggccacagttctagagtctgaggggacccgagagtcggccatcaatgtggcagaagggaagaaacaggcccagatcctggcctccgaagcagaaaaggctgaacagataaatcaggcagcaggagaggccagtgcagttctggcgaaggccaaggctaaagctgaagctattcgaatcctggctgcagctctgacacaacataatggagatgcagcagcttcactgactgtggccgagcagtatgtcagcgcgttctccaaactggccaaggactccaacactatcctactgccctccaaccctggcgatgtcaccagcatggtggctcaggccatgggtgtatatggagccctcaccaaagccccagtgccagggactccagactcactctccagtgggagcagcagagatgtccagggtacagatgcaagtcttgatgaggaacttgatcgagtcaagatgagttagtggagctgggcttggccagggagtctggggacaaggaagcagattttcctgattctggctctagcttccctgccaagattttggtttttatttttttatttgaactttagtcgtgtaataaactcaccagtggcaaaccaaa

SEQ ID NO: 61 - DNA, 1437 bp, Homo sapiens
agtacatccgggggagcggaactgcaagaggaaaggctcgggtaggcttctgggagcgaccgctccgctcgtctcgttggttccggaggtcgctgcggcggtgggaaatgctggcgcgcgcggcgcggggcactggggcccttttgctgaggggctctctactggcttctggccgcgctccgcgccgcgcctcctctggattgccccgaaacaccgtggtactgttcgtgccgcagcaggaggcctgggtggtggagcgaatgggccgattccaccggatcctggagcctgagctgctgcttttctgggcatgttccatgtgttgactccctacatactccaggactagcttaggtcccaacccaatagttcccagccttctgaggacccatgactcctctttccagggtttgaacatcctcatccctgtgttagaccggatccgatatgtgcagagtctcaaggaaattgtcatcaacgtgcctgagcagtcggctgtgactctcgacaatgtaactctgcaaatcgatggagtcctttacctgcgcatcatggacccttacaaggcaagctacggtgtggaggaccctgagtatgccgtcacccagctagctcaaacaaccatgagatcagagctcggcaaactctctctggacaaagtcttccgggaacgggagtccctgaatgccagcattgtggatgccatcaaccaagctgctgactgctggggtatccgctgcctccgttatgagatcaaggatatccatgtgccaccccgggtgaaagagtctatgcagatgcaggtggaggcagagcggcggaaacgggccacagttctagagtctgaggggacccgagagtcggccatcaatgtggcagaagggaagaaacaggcccagatcctggcctccgaagcagaaaaggctgaacagataaatcaggcagcaggagaggccagtgcagttctggcgaaggccaaggctaaagctgaagctattcgaatcctggctgcagctctgacacaacataatggagatgcagcagcttcactgactgtggccgagcagtatgtcagcgcgttctccaaactggccaaggactccaacactatcctactgccctccaaccctggcgatgtcaccagcatggtggctcaggccatgggtgtatatggagccctcaccaaagccccagtgccagggactccagactcactctccagtgggagcagcagagatgtccagggtacagatgcaagtcttgatgaggaacttgatcgagtcaagatgagttagtggagctgggcttggccagggagtctggggacaaggaagcagattttcctgattctggctctagcttccctgccaagattttggtttttatttttttatttgaactttagtcgtgtaataaactcaccagtggcaaaccaaa

SEQ ID NO: 62 - DNA, 1525 bp, Homo sapiens
agtacatccgggggagcggaactgcaagaggaaaggctcgggtaggcttctgggagcgaccgctccgctcgtctcgttggttccggaggtcgctgcggcggtgggaaatgctggcgcgcgcggcgcggggcactggggcccttttgctgaggggctctctactggcttctggccgcgctccgcgccgcgcctcctctggattgccccgaaacaccgtggtactgttcgtgccgcagcaggaggcctgggtggtggagcgaatgggccgattccaccggatcctggagcctggtttgaacatcctcatccctgtgttagaccggatccgatatgtgcagagtctcaaggaaattgtcatcaacgtgcctgagcagtcggctgtgactctcgacaatgtaactctgcaaatcgatggagtcctttacctgcgcatcatggacccttacaaggcaagctacggtgtggaggaccctgagtatgccgtcacccagctagctcaaacaaccatgagatcagagctcggcaaactctctctggacaaagtcttccgggaacgggagtccctgaatgccagcattgtggatgccatcaaccaagctgctgactgctggggtatccgctgcctccgttatgagatcaaggatatccatgtgccaccccgggtgaaagagtctatgcagatgcaggtggaggcagagcggcggaaacgggccacagttctagagtctgaggggacccgagagtcggccatcaatgtggcagaagggaagaaacaggcccagatcctggcctccgaagcagaaaaggctgaacagataaatcaggcagcaggagaggccagtgcagttctggcgaaggccaaggctaaagctgaagctattcgaatcctggctgcagctctgacacaacatgtgagaggcccctgggtgggaatggggacaggaattgacagtggaaggggttctcttatctacgcttgaggagagttccgcctctgtgggctctgttgagccagattacatggtcctttttattgtgaactgctttcttcattccccatcccccccttcttctccgtatcggtgatctctgatttttatccccctgtgatcacagaatggagatgcagcagcttcactgactgtggccgagcagtatgtcagcgcgttctccaaactggccaaggactccaacactatcctactgccctccaaccctggcgatgtcaccagcatggtggctcaggccatgggtgtatatggagccctcaccaaagccccagtgccagggactccagactcactctccagtgggagcagcagagatgtccagggtacagatgcaagtcttgatgaggaacttgatcgagtcaagatgagttagtggagctgggcttggccagggagtctggggacaaggaagcagattttcctgattctggctctagcttccctgccaagattttggtttttatttttttatttgaactttagtcgtgtaataaactcaccagtggcaaaccaaa

SEQ ID NO: 63 - DNA, 1443 bp, Homo sapiens
agtacatccgggggagcggaactgcaagaggaaaggctcgggtaggcttctgggagcgaccgctccgctcgtctcgttggttccggaggtcgctgcggcggtgggaaatgctggcgcgcgcggcgcggggcactggggcccttttgctgaggggctctctactggcttctggccgcgctccgcgccgcgcctcctctggattgccccgaaacaccgtggtactgttcgtgccgcagcaggaggcctgggtggtggagcgaatgggccgattccaccggatcctggagcctggtttgaacatcctcatccctgtgttagaccggatccgatatgtgcagagtctcaaggaaattgtcatcaacgtgcctgagcagtcggctgtgactctcgacaatgtaactctgcaaatcgatggagtcctttacctgcgcatcatggacccttacaaggcaagctacggtgtggaggaccctgagtatgccgtcacccagctagctcaaacaaccatgagatcagagctcggcaaactctctctggacaaagtcttccgggaacgggagtccctgaatgccagcattgtggatgccatcaaccaagctgctgactgctggggtatccgctgcctccgttatgagatcaaggatatccatgtgccaccccgggtgaaagagtctatgcagatgcaggtggaggcagagcggcggaaacgggccacagttctagagtctgaggggacccgagagtcggccatcaatgtggcagaagggaagaaacaggcccagatcctggcctccgaagcagaaaaggctgaacagataaatcaggcagcaggtcaggagagggtagaggctgagggaggagcaaggcatgggcctttgaagattggtgctggggcaggatctttggggtactttgacttcatgggtcaagcaagctctgtcccttctcttgcaggagaggccagtgcagttctggcgaaggccaaggctaaagctgaagctattcgaatcctggctgcagctctgacacaacataatggagatgcagcagcttcactgactgtggccgagcagtatgtcagcgcgttctccaaactggccaaggactccaacactatcctactgccctccaaccctggcgatgtcaccagcatggtggctcaggccatgggtgtatatggagccctcaccaaagccccagtgccagggactccagactcactctccagtgggagcagcagagatgtccagggtacagatgcaagtcttgatgaggaacttgatcgagtcaagatgagttagtggagctgggcttggccagggagtctggggacaaggaagcagattttcctgattctggctctagcttccctgccaagattttggtttttatttttttatttgaactttagtcgtgtaataaactcaccagtggcaaaccaaa

SEQ ID NO: 64 - DNA, 1191 bp, Homo sapiens
agtacatccgggggagcggaactgcaagaggaaaggctcgggtaggcttctgggagcgaccgctccgctcgtctcgttggttccggaggtcgctgcggcggtgggaaatgctggcgcgcgcggcgcggggcactggggcccttttgctgaggggctctctactggcttctggccgcgctccgcgccgcgcctcctctggattgccccgaaacaccgtggtactgttcgtgccgcagcaggaggcctgggtggtggagcgaatgggccgattccaccggatcctggagcctggtttgaacatcctcatccctgtgttagaccggatccgatatgtgcagagtctcaaggaaattgtcatcaacgtgcctgagcagtcggctgtgactctcgacaatgtaactctgcaaatcgatggagtcctttacctgcgcatcatggacccttacaaggcaagctacggtgtggaggaccctgagtatgccgtcacccagctagctcaaacaaccatgagatcagagctcggcaaactctctctggacaaagtcttccgggaacgggagtccctgaatgccagcattgtggatgccatcaaccaagctgctgactgctggggtatccgctgcctccgttatgagatcaaggatatccatgtgccaccccgggtgaaagagtctatgcagatgcaggtggaggcagagcggcggaaacgggccacagttctagagtctgaggggacccgagagtcggccatcaatgtggcagaagggaagaaacaggcccagatcctggcctccgaagcagaaaaggctgaacagataaatcaggcagcaggagaggccagtgcagttctggcgaaggccaaggctaaagctgaagctattcgaatcctggctgcagctctgacacaacatgccatgggtgtatatggagccctcaccaaagccccagtgccagggactccagactcactctccagtgggagcagcagagatgtccagggtacagatgcaagtcttgatgaggaacttgatcgagtcaagatgagttagtggagctgggcttggccagggagtctggggacaaggaagcagattttcctgattctggctctagcttccctgccaagattttggtttttatttttttatttgaactttagtcgtgtaataaactcaccagtggcaaaccaaa

SEQ ID NO: 65 - DNA, 1648 bp, Homo sapiens
agtacatccgggggagcggaactgcaagaggaaaggctcgggtaggcttctgggagcgaccgctccgctcgtctcgttggttccggaggtcgctgcggcggtgggaaatgctggcgcgcgcggcgcggggcactggggcccttttgctgaggggctctctactggcttctggccgcgctccgcgccgcgcctcctctggattgccccgaaacaccgtggtactgttcgtgccgcagcaggaggcctgggtggtggagcgaatgggccgattccaccggatcctggagcctggtttgaacatcctcatccctgtgttagaccggatccgatatgtgcagagtctcaaggaaattgtcatcaacgtgcctgagcagtcggctgtgactctcgacaatgtaactctgcaaatcgatggagtcctttacctgcgcatcatggacccttacaaggcaagctacggtgtggaggaccctgagtatgccgtcacccagctagctcaaacaaccatgagatcagagctcggcaaactctctctggacaaagtcttccgggaacgggagtccctgaatgccagcattgtggatgccatcaaccaagctgctgactgctggggtatccgctgcctccgttatgagatcaaggatatccatgtgccaccccgggtgaaagagtctatgcagatgcaggtggaggcagagcggcggaaacgggccacagttctagagtctgaggggacccgagagtcggccatcaatgtggcagaagggaagaaacaggcccagatcctggcctccgaagcagaaaaggctgaacagataaatcaggcagcaggtcaggagagggtagaggctgagggaggagcaaggcatgggcctttgaagattggtgctggggcaggatctttggggtactttgacttcatgggtcaagcaagctctgtcccttctcttgcaggagaggccagtgcagttctggcgaaggccaaggctaaagctgaagctattcgaatcctggctgcagctctgacacaacatgtgagaggcccctgggtgggaatggggacaggaattgacagtggaaggggttctcttatctacgcttgaggagagttccgcctctgtgggctctgttgagccagattacatggtcctttttattgtgaactgctttcttcattccccatcccccccttcttctccgtatcggtgatctctgatttttatccccctgtgatcacagaatggagatgcagcagcttcactgactgtggccgagcagtatgtcagcgcgttctccaaactggccaaggactccaacactatcctactgccctccaaccctggcgatgtcaccagcatggtggctcaggccatgggtgtatatggagccctcaccaaagccccagtgccagggactccagactcactctccagtgggagcagcagagatgtccagggtacagatgcaagtcttgatgaggaacttgatcgagtcaagatgagttagtggagctgggcttggccagggagtctggggacaaggaagcagattttcctgattctggctctagcttccctgccaagattttggtttttatttttttatttgaactttagtcgtgtaataaactcaccagtggcaaaccaaa

SEQ ID NO: 66 - DNA, 1469 bp, Homo sapiens
agtacatccgggggagcggaactgcaagaggaaaggctcgggtaggcttctgggagcgaccgctccgctcgtctcgttggttccggaggtcgctgcggcggtgggaaatgctggcgcgcgcggcgcggggcactggggcccttttgctgaggggctctctactggcttctggccgcgctccgcgccgcgcctcctctggattgccccgaaacaccgtggtactgttcgtgccgcagcaggaggcctgggtggtggagcgaatgggccgattccaccggatcctggagcctggtttgaacatcctcatccctgtgttagaccggatccgatatgtgcagagtctcaaggaaattgtcatcaacgtgcctgagcagtcggctgtgactctcgacaatgtaactctgcaaatcgatggagtcctttacctgcgcatcatggacccttacaaggcaagctacggtgtggaggaccctgagtatgccgtcacccagctagctcaaacaaccatgagatcagagctcggcaaactctctctggacaaagtcttccgggtaagcagatctgagccagagttagggtttgaagacacaaacctgacactcttaatcttttctgaaggtcaagatcagtcccaggcccttctcagtgtaggcccttgataggtaggttgaggctgtggggcttacacctctttttccaggaacgggagtccctgaatgccagcattgtggatgccatcaaccaagctgctgactgctggggtatccgctgcctccgttatgagatcaaggatatccatgtgccaccccgggtgaaagagtctatgcagatgcaggtggaggcagagcggcggaaacgggccacagttctagagtctgaggggacccgagagtcggccatcaatgtggcagaagggaagaaacaggcccagatcctggcctccgaagcagaaaaggctgaacagataaatcaggcagcaggagaggccagtgcagttctggcgaaggccaaggctaaagctgaagctattcgaatcctggctgcagctctgacacaacataatggagatgcagcagcttcactgactgtggccgagcagtatgtcagcgcgttctccaaactggccaaggactccaacactatcctactgccctccaaccctggcgatgtcaccagcatggtggctcaggccatgggtgtatatggagccctcaccaaagccccagtgccagggactccagactcactctccagtgggagcagcagagatgtccagggtacagatgcaagtcttgatgaggaacttgatcgagtcaagatgagttagtggagctgggcttggccagggagtctggggacaaggaagcagattttcctgattctggctctagcttccctgccaagattttggtttttatttttttatttgaactttagtcgtgtaataaactcaccagtggcaaaccaaa

SEQ ID NO: 67 - DNA, 2154 bp, Homo sapiens
agtacatccgggggagcggaactgcaagaggaaaggctcgggtaggcttctgggagcgaccgctccgctcgtctcgttggttccggaggtcgctgcggcggtgggaaatgctggcgcgcgcggcgcggggcactggggcccttttgctgagggtgagagcgaggcaacctttccagagggtcaggacagagattacctgggttctccgctggaaaagagcgaaattccaacttttggagaggactggggtcagaggtcatggtccccatgtgattctccgaggatcctgagggtcgtggtttatggagatgccttcaggaccgaggggcggcgtgtctggccagatgggatctctgctcaccctcttctttccttcagggctctctactggcttctggccgcgctccgcgccgcgcctcctctggattgccccgaaacaccgtggtactgttcgtgccgcagcaggaggcctgggtggtggagcgaatgggccgattccaccggatcctggagcctgtgagaaacctcttctgcccaccctgggccagccagatgaccaatccctcacgacatgcaatgtcgggaggacttcctttgggcctgcccgcactgttagctcccgactctgtaggccagacctgacagggcccaggctgctgaccatcatccccatgttaccaccttttcctatgcatctcacaggccccattcttgggaatctcccctgcccactctcagccctacctctcagtctgcatagagatggctattctgctggctccgattctcatgactctcccctccattcaggggcctagtcttgcattcctgttctcttgggttttcttaccagtgacacctcagccttctgaggacttatttcttggtaggagctgctgcttttctgggcatgttccatgtgttgactccctacatactccaggactagcttaggtcccaacccaatagttcccagccttctgaggacccatgactcctctttccagggtttgaacatcctcatccctgtgttagaccggatccgatatgtgcagagtctcaaggaaattgtcatcaacgtgcctgagcagtcggctgtgactctcgacaatgtaactctgcaaatcgatggagtcctttacctgcgcatcatggacccttacaaggcaagctacggtgtggaggaccctgagtatgccgtcacccagctagctcaaacaaccatgagatcagagctcggcaaactctctctggacaaagtcttccgggaacgggagtccctgaatgccagcattgtggatgccatcaaccaagctgctgactgctggggtatccgctgcctccgttatgagatcaaggatatccatgtgccaccccgggtgaaagagtctatgcagatgcaggtggaggcagagcggcggaaacgggccacagttctagagtctgaggggacccgagagtcggccatcaatgtggcagaagggaagaaacaggcccagatcctggcctccgaagcagaaaaggctgaacagataaatcaggcagcaggagaggccagtgcagttctggcgaaggccaaggctaaagctgaagctattcgaatcctggctgcagctctgacacaacataatggagatgcagcagcttcactgactgtggccgagcagtatgtcagcgcgttctccaaactggccaaggactccaacactatcctactgccctccaaccctggcgatgtcaccagcatggtggctcaggccatgggtgtatatggagccctcaccaaagccccagtgccagggactccagactcactctccagtgggagcagcagagatgtccagggtacagatgcaagtcttgatgaggaacttgatcgagtcaagatgagttagtggagctgggcttggccagggagtctggggacaaggaagcagattttcctgattctggctctagcttccctgccaagattttggtttttatttttttatttgaactttagtcgtgtaataaactcaccagtggcaaaccaaaaaaaaaaatctttgattggggaatgaagttgggaaagtcactagcattttccttggatccagtcctgtcagcatgatgcctccatgaataagagtgaacttcttgtaaagtgaaact

SEQ ID NO: 68 - DNA, 1464 bp, Homo sapiens
agtacatccgggggagcggaactgcaagaggaaaggctcgggtaggcttctgggagcgaccgctccgctcgtctcgttggttccggaggtcgctgcggcggtgggaaatgctggcgcgcgcggcgcggggcactggggcccttttgctgaggggctctctactggcttctggccgcgctccgcgccgcgcctcctctggattgccccgaaacaccgtggtactgttcgtgccgcagcaggaggcctgggtggtggagcgaatgggccgattccaccggatcctggagcctggtttgaacatcctcatccctgtgttagaccggatccgatatgtgcagagtctcaaggaaattgtcatcaacgtgcctgagcagtcggctgtgactctcgacaatgtaactctgcaaatcgatggagtcctttacctgcgcatcatggacccttacaaggcaagctacggtgtggaggaccctgagtatgccgtcacccagctagctcaaacaaccatgagatcagagctcggcaaactctctctggacaaagtcttccgggaacgggagtccctgaatgccagcattgtggatgccatcaaccaagctgctgactgctggggtatccgctgcctccgttatgagatcaaggatatccatgtgccaccccgggtgaaagagtctatgcagatgcaggtgggggccaaggaggggtgggaaaagggcctcagggctccagtaccaggaggatccagacttccctcctgttatgatgggtagagttgcatgtctgtatcagtctcccttggcttgttgattgggattgttgtgggcttccaggtggaggcagagcggcggaaacgggccacagttctagagtctgaggggacccgagagtcggccatcaatgtggcagaagggaagaaacaggcccagatcctggcctccgaagcagaaaaggctgaacagataaatcaggcagcaggagaggccagtgcagttctggcgaaggccaaggctaaagctgaagctattcgaatcctggctgcagctctgacacaacataatggagatgcagcagcttcactgactgtggccgagcagtatgtcagcgcgttctccaaactggccaaggactccaacactatcctactgccctccaaccctggcgatgtcaccagcatggtggctcaggccatgggtgtatatggagccctcaccaaagccccagtgccagggactccagactcactctccagtgggagcagcagagatgtccagggtacagatgcaagtcttgatgaggaacttgatcgagtcaagatgagttagtggagctgggcttggccagggagtctggggacaaggaagcagattttcctgattctggctctagcttccctgccaagattttggtttttatttttttatttgaactttagtcgtgtaataaactcaccagtggcaaaccaaa

SEQ ID NO: 69 - DNA, 1159 bp, Homo sapiens
agtacatccgggggagcggaactgcaagaggaaaggctcgggtaggcttctgggagcgaccgctccgctcgtctcgttggttccggaggtcgctgcggcggtgggaaatgctggcgcgcgcggcgcggggcactggggcccttttgctgaggggctctctactggcttctggccgcgctccgcgccgcgcctcctctggattgccccgaaacaccgtggtactgttcgtgccgcagcaggaggcctgggtggtggagcgaatgggccgattccaccggatcctggagcctggtttgaacatcctcatccctgtgttagaccggatccgatatgtgcagagtctcaaggaaattgtcatcaacgtgcctgagcagtcggctgtgactctcggaacgggagtccctgaatgccagcattgtggatgccatcaaccaagctgctgactgctggggtatccgctgcctccgttatgagatcaaggatatccatgtgccaccccgggtgaaagagtctatgcagatgcaggtggaggcagagcggcggaaacgggccacagttctagagtctgaggggacccgagagtcggccatcaatgtggcagaagggaagaaacaggcccagatcctggcctccgaagcagaaaaggctgaacagataaatcaggcagcaggagaggccagtgcagttctggcgaaggccaaggctaaagctgaagctattcgaatcctggctgcagctctgacacaacataatggagatgcagcagcttcactgactgtggccgagcagtatgtcagcgcgttctccaaactggccaaggactccaacactatcctactgccctccaaccctggcgatgtcaccagcatggtggctcaggccatgggtgtatatggagccctcaccaaagccccagtgccagggactccagactcactctccagtgggagcagcagagatgtccagggtacagatgcaagtcttgatgaggaacttgatcgagtcaagatgagttagtggagctgggcttggccagggagtctggggacaaggaagcagattttcctgattctggctctagcttccctgccaagattttggtttttatttttttatttgaactttagtcgtgtaataaactcaccagtggcaaaccaaa

SEQ ID NO: 70 - DNA, 1613 bp, Homo sapiens
agtacatccgggggagcggaactgcaagaggaaaggctcgggtaggcttctgggagcgaccgctccgctcgtctcgttggttccggaggtcgctgcggcggtgggaaatgctggcgcgcgcggcgcggggcactggggcccttttgctgaggggctctctactggcttctggccgcgctccgcgccgcgcctcctctggattgccccgaaacaccgtggtactgttcgtgccgcagcaggaggcctgggtggtggagcgaatgggccgattccaccggatcctggagcctggtttgaacatcctcatccctgtgttagaccggatccgatatgtgcagagtctcaaggaaattgtcatcaacgtgcctgagcagtcggctgtgactctcgacaatgtaactctgcaaatcgatggagtcctttacctgcgcatcatggacccttacaaggcaagctacggtgtggaggaccctgagtatgccgtcacccagctagctcaaacaaccatgagatcagagctcggcaaactctctctggacaaagtcttccgggtaagcagatctgagccagagttagggtttgaagacacaaacctgacactcttaatcttttctgaaggtcaagatcagtcccaggcccttctcagtgtaggcccttgataggtaggttgaggctgtggggcttacacctctttttccaggaacgggagtccctgaatgccagcattgtggatgccatcaaccaagctgctgactgctggggtatccgctgcctccgttatgagatcaaggatatccatgtgccaccccgggtgaaagagtctatgcagatgcaggtgggggccaaggaggggtgggaaaagggcctcagggctccagtaccaggaggatccagacttccctcctgttatgatgggtagagttgcatgtctgtatcagtctcccttggcttgttgattgggattgttgtgggcttccaggtggaggcagagcggcggaaacgggccacagttctagagtctgaggggacccgagagtcggccatcaatgtggcagaagggaagaaacaggcccagatcctggcctccgaagcagaaaaggctgaacagataaatcaggcagcaggagaggccagtgcagttctggcgaaggccaaggctaaagctgaagctattcgaatcctggctgcagctctgacacaacataatggagatgcagcagcttcactgactgtggccgagcagtatgtcagcgcgttctccaaactggccaaggactccaacactatcctactgccctccaaccctggcgatgtcaccagcatggtggctcaggccatgggtgtatatggagccctcaccaaagccccagtgccagggactccagactcactctccagtgggagcagcagagatgtccagggtacagatgcaagtcttgatgaggaacttgatcgagtcaagatgagttagtggagctgggcttggccagggagtctggggacaaggaagcagattttcctgattctggctctagcttccctgccaagattttggtttttatttttttatttgaactttagtcgtgtaataaactcaccagtggcaaaccaaa

SEQ ID NO: 71 - DNA, 1185 bp, Homo sapiens
agtacatccgggggagcggaactgcaagaggaaaggctcgggtaggcttctgggagcgaccgctccgctcgtctcgttggttccggaggtcgctgcggcggtgggaaatgctggcgcgcgcggcgcggggcactggggcccttttgctgaggggctctctactggcttctggccgcgctccgcgccgcgcctcctctggattgccccgaaacaccgtggtactgttcgtgccgcagcaggaggcctgggtggtggagcgaatgggccgattccaccggatcctggagcctggtttgaacatcctcatccctgtgttagaccggatccgatatgtgcagagtctcaaggaaattgtcatcaacgtgcctgagcagtcggctgtgactctcgacaatgtaactctgcaaatcgatggagtcctttacctgcgcatcatggacccttacaaggcaagctacggtgtggaggaccctgagtatgccgtcacccagctagctcaaacaaccatgagatcagagctcggcaaactctctctggacaaagtcttccgggtggaggcagagcggcggaaacgggccacagttctagagtctgaggggacccgagagtcggccatcaatgtggcagaagggaagaaacaggcccagatcctggcctccgaagcagaaaaggctgaacagataaatcaggcagcaggagaggccagtgcagttctggcgaaggccaaggctaaagctgaagctattcgaatcctggctgcagctctgacacaacataatggagatgcagcagcttcactgactgtggccgagcagtatgtcagcgcgttctccaaactggccaaggactccaacactatcctactgccctccaaccctggcgatgtcaccagcatggtggctcaggccatgggtgtatatggagccctcaccaaagccccagtgccagggactccagactcactctccagtgggagcagcagagatgtccagggtacagatgcaagtcttgatgaggaacttgatcgagtcaagatgagttagtggagctgggcttggccagggagtctggggacaaggaagcagattttcctgattctggctctagcttccctgccaagattttggtttttatttttttatttgaactttagtcgtgtaataaactcaccagtggcaaaccaaa

SEQ ID NO: 72 - DNA, 2799 bp, Homo sapiens
agtacatccgggggagcggaactgcaagaggaaaggctcgggtaggcttctgggagcgaccgctccgctcgtctcgttggttccggaggtcgctgcggcggtgggaaatgctggcgcgcgcggcgcggggcactggggcccttttgctgagggtgagagcgaggcaacctttccagagggtcaggacagagattacctgggttctccgctggaaaagagcgaaattccaacttttggagaggactggggtcagaggtcatggtccccatgtgattctccgaggatcctgagggtcgtggtttatggagatgccttcaggaccgaggggcggcgtgtctggccagatgggatctctgctcaccctcttctttccttcagggctctctactggcttctggccgcgctccgcgccgcgcctcctctggattgccccgaaacaccgtggtactgttcgtgccgcagcaggaggcctgggtggtggagcgaatgggccgattccaccggatcctggagcctgtgagaaacctcttctgcccaccctgggccagccagatgaccaatccctcacgacatgcaatgtcgggaggacttcctttgggcctgcccgcactgttagctcccgactctgtaggccagacctgacagggcccaggctgctgaccatcatccccatgttaccaccttttcctatgcatctcacaggccccattcttgggaatctcccctgcccactctcagccctacctctcagtctgcatagagatggctattctgctggctccgattctcatgactctcccctccattcaggggcctagtcttgcattcctgttctcttgggttttcttaccagtgacacctcagccttctgaggacttatttcttggtaggagctgctgcttttctgggcatgttccatgtgttgactccctacatactccaggactagcttaggtcccaacccaatagttcccagccttctgaggacccatgactcctctttccagggtttgaacatcctcatccctgtgttagaccggatccgatatgtgcagagtctcaaggaaattgtcatcaacgtgcctgagcagtcggctgtgactctcggtgaggggttcagggtgacatgggtgctctgaggctattaggatgtggttgctgtagatccagagcttagtagaaagaactggttgggacctagaggcctgactttccccgttttctctcctggttctacagacaatgtaactctgcaaatcgatggagtcctttacctgcgcatcatggacccttacaaggcaagctacggtgtggaggaccctgagtatgccgtcacccagctagctcaaacaaccatgagatcagagctcggcaaactctctctggacaaagtcttccgggaacgggagtccctgaatgccagcattgtggatgccatcaaccaagctgctgactgctggggtatccgctgcctccgttatgagatcaaggatatccatgtgccaccccgggtgaaagagtctatgcagatgcaggtggaggcagagcggcggaaacgggccacagttctagagtctgaggggacccgagagtcggccatcaatgtggcagaagggaagaaacaggcccagatcctggcctccgaagcagaaaaggctgaacagataaatcaggcagcaggagaggccagtgcagttctggcgaaggccaaggctaaagctgaagctattcgaatcctggctgcagctctgacacaacatgtgagaggcccctgggtgggaatggggacaggaattgacagtggaaggggttctcttatctacgcttgaggagagttccgcctctgtgggctctgttgagccagattacatggtcctttttattgtgaactgctttcttcattccccatcccccccttcttctccgtatcggtgatctctgatttttatccccctgtgatcacagaatggagatgcagcagcttcactgactgtggccgagcagtatgtcagcgcgttctccaaactggccaaggactccaacactatcctactgccctccaaccctggcgatgtcaccagcatggtggctcaggttagagctctctgaggacccagcacagagcactggtgccagggaccaaactgagaccccaccaccgtcatcaacacttacataccataaaggtcttcagagtgccttggccctagacctcccttcgttctttgtagagatggaatctaagaatgaaacatctccactcagtcctgcaaatatggaagttcttgagatacctttttttggtagatacttgtgctggtattctgagagtcactttactctgatggtttgcaagattcctaaaatcaactccagagcttacaagacaggtttgagagagggagaaaggaaaaccaacttactggcccccatgccatcttttcccgtttagccattggtaggctgggctgcacctctgtcaagtgtcctcatggtattctctctgttcctctcctcaggccatgggtgtatatggagccctcaccaaagccccagtgccagggactccagactcactctccagtgggagcagcagagatgtccagggtacagatgcaagtcttgatgaggaacttgatcgagtcaagatgagttagtggagctgggcttggccagggagtctggggacaaggaagcagattttcctgattctggctctagcttccctgccaagattttggtttttatttttttatttgaactttagtcgtgtaataaactcaccagtggcaaaccaaa

SEQ ID NO: 73 - DNA, 984 bp, Homo sapiens
agtacatccgggggagcggaactgcaagaggaaaggctcgggtaggcttctgggagcgaccgctccgctcgtctcgttggttccggaggtcgctgcggcggtgggaaatgctggcgcgcgcggcgcggggcactggggcccttttgctgaggggctctctactggcttctggccgcgctccgcgccgcgcctcctctggattgccccgaaacaccgtggtactgttcgtgccgcagcaggaggcctgggtggtggagcgaatgggccgattccaccggatcctggagcctggtttgaacatcctcatccctgtgttagaccggatccgatatgtgcagagtctcaaggaaattgtcatcaacgtgcctgagcagtcggctgtgactctcgacaatgtaactctgcaaatcgatggagtcctttacctgcgcatcatggacccttacaaggcaagctacggtgtggaggaccctgagtatgccgtcacccagctagctcaaacaaccatgagatcagagctcggcaaactctctctggacaaagtcttccgggaacgggagtccctgaatgccagcattgtggctcaggccatgggtgtatatggagccctcaccaaagccccagtgccagggactccagactcactctccagtgggagcagcagagatgtccagggtacagatgcaagtcttgatgaggaacttgatcgagtcaagatgagttagtggagctgggcttggccagggagtctggggacaaggaagcagattttcctgattctggctctagcttccctgccaagattttggtttttatttttttatttgaactttagtcgtgtaataaactcaccagtggcaaaccaaaaaaaaaaatctttgattggggaatgaagttgggaaagtcactagcattttccttggatccagtcctgtcagcatgatgcctccatgaataagagtgaacttcttgtaaagtgaaact

SEQ ID NO: 74 - DNA, 766 bp, Homo sapiens
agtacatccgggggagcggaactgcaagaggaaaggctcgggtaggcttctgggagcgaccgctccgctcgtctcgttggttccggaggtcgctgcggcggtgggaaatgctggcgcgcgcggcgcggggcactggggcccttttgctgaggggctctctactggcttctggccgcgctccgcgccgcgcctcctctggattgccccgaaacaccgtggtactgttcgtgccgcagcaggaggcctgggtggtggagcgaatgggccgattccaccggatcctggagcctggtttgaacatcctcatccctgtgttagaccggatccgatatgtgcagagtctcaaggaaattgtcatcaacgtgcctgagcagtcggctgtgactctcgacaatgtaactctgcaaatcgatggagtcctttacctgcgcatcatggacccttacaaggcaagctacggtgtggaggaccctgagtatgccgtcacccagctagctcaaacaaccatgagatcagagctcggcaaactctcttccagactcactctccagtgggagcagcagagatgtccagggtacagatgcaagtcttgatgaggaacttgatcgagtcaagatgagttagtggagctgggcttggccagggagtctggggacaaggaagcagattttcctgattctggctctagcttccctgccaagattttggtttttatttttttatttgaactttagtcgtgtaataaactcaccagtggcaaaccaaa

SEQ ID NO: 75 - DNA, 1295 bp, Homo sapiens
agaagaggaagacaggaagggggtggggatgtgaagcgaccgtcccagccttccccgcccgccacccccaccccaactcggcagccgtcacgtgatgcctggagtgggaggtggggagaaaaggcgagacttttgtgggtgctcccgatcgccagtagttccttcagtctcagccgccaactccggaggcgcggtgctcggcccgggagcgcgagcgggaggagcagagacccgcagccgggagcccgagcgcgggcgatgcaggctccgcgagcggcacctgcggctcctctaagctacgaccgtcgtctccgcggcagcagcgcgggccccagcagcctcggcagccacagccgctgcagccggggcagcctccgctgctgtcgcctcctctgatgcgcttgccctctcccggccccgggactccgggagaatgtgggtcctaggcatcgcggcaactttttgcggattgttcttgcttccaggctttgcgctgcaaatccagtgctaccagtgtgaagaattccagctgaacaacgactgctcctcccccgagttcattgtgaattgcacggtgaacgttcaagacatgtgtcagaaagaagtgatggagcaaagtgccgggatcatgtaccgcaagtcctgtgcatcatcagcggcctgtctcatcgcctctgccggttctccttgcagaggactggcgccgggacgcgaagagcaacgggcgctgcacaaagcgggcgctgtcggtggtggagtgcgcatgtacgcgcaggcgcttctcgtggttggcgtgctgcagcgacaggcggcagcacagcacctgcacgaacacccgccgaaactgctgcgaggacaccgtgtacaggagcgggttgatgaccgagctgaggtagaaaaacgtctccgagaaggggaggaggatcatgtacgcccggaagtaggacctcgtccagtcgtgcttgggtttggccgcagccatgatcctccgaatctggttgggcatccagcatacggccaatgtcacaacaatcagccctgggcagacacgagcaggagggagagacagagaaaagaaaaacacagcatgagaacacagtaaataaataaaaccataaaatatttagcccctctgttctgtgcttactggccaggaaatggtaccaatttttcagtgttggacttgacagcttcttttgccacaagcaagagagaatttaacactgtttcaaacccgggggagttggctgtgttaaagaaagaccattaaatgctttagacagtgtatttatacc

SEQ ID NO: 76 - DNA, 1367 bp, Homo sapiens
agaagaggaagacaggaagggggtggggatgtgaagcgaccgtcccagccttccccgcccgccacccccaccccaactcggcagccgtcacgtgatgcctggagtgggaggtggggagaaaaggcgagacttttgtgggtgctcccgatcgccagtagttccttcagtctcagccgccaactccggaggcgcggtgctcggcccgggagcgcgagcgggaggagcagagacccgcagccgggagcccgagcgcgggcgatgcaggctccgcgagcggcacctgcggctcctctaagctacgaccgtcgtctccgcggcagcagcgcgggccccagcagcctcggcagccacagccgctgcagccggggcagcctccgctgctgtcgcctcctctgatgcgcttgccctctcccggccccgggactccgggagaatgtgggtcctaggcatcgcggcaactttttgcggattgttcttgcttccaggctttgcgctgcaaatccagtgctaccagtgtgaagaattccagctgaacaacgactgctcctcccccgagttcattgtgaattgcacggtgaacgttcaagacatgtgtcagaaagaagtgatggagcaaagtgccgggtctcactgtgtcacgaggctggagtgcagtggaacaatttcagcacactgcaacctctgcctcccaggctcaaatgatcatcccacctaagcctccggagtagctgggaccacaggcaagcgccaccatgcccagctgataccaatgtcttttaaaaaatgttgtatgtggaaataaattgagacttatagaaaagctgcaaaaatagtgcagtttctatatatccttcccccatctttggctagtgttaacaatctacataaccgcagtacgatgatcaaggctaggaaattaacattggcacagtactgttaatgaaaccatgctttgttttgagattcccacagttttgcctttttctgttccaagatcctatccaggatcccacgttgcatttcattgtcatgtctccttctcctctaacctctgacaatgcatcattctttccatgtcttttgtgatgttgacacttttgaagaggactggtccagatttttgtacactgtccctcagtttgggattgtctgctgttttctcatgaacagatagaggttttgcatttttgacaagaatcctcagaagagatgcacccttctcagtgcactgtagcaaggggcgcatgctgtcaatgtcttactggtgatgttaactttgatcgcttttgattcagatagtatctgctgggtttttccactgtaaagttactattttttccattgtaattaataaataacttgaggga

SEQ ID NO: 77 - DNA, 1520 bp, Homo sapiens
agaagaggaagacaggaagggggtggggatgtgaagcgaccgtcccagccttccccgcccgccacccccaccccaactcggcagccgtcacgtgatgcctggagtgggaggtggggagaaaaggcgagacttttgtgggtgctcccgatcgccagtagttccttcagtctcagccgccaactccggaggcgcggtgctcggcccgggagcgcgagcgggaggagcagagacccgcagccgggagcccgagcgcgggcgatgcaggctccgcgagcggcacctgcggctcctctaagctacgaccgtcgtctccgcggcagcagcgcgggccccagcagcctcggcagccacagccgctgcagccggggcagcctccgctgctgtcgcctcctctgatgcgcttgccctctcccggccccgggactccgggagaatgtgggtcctaggcatcgcggcaactttttgcggattgttcttgcttccaggctttgcgctgcaaatccagtgctaccagtgtgaagaattccagctgaacaacgactgctcctcccccgagttcattgtgaattgcacggtgaacgttcaagacatgtgtcagaaagaagtgatggagcaaagtgccgacactaaaagaacaaacaccttgctcttcgagatgagacattttgccaagcagttgaccacttagttctcaagaagcaactatctctttcatgtgccttctgaggaagtattcagagggggaatatcaaatgtctttcccttggactctcccaggtctcactgtgtcacgaggctggagtgcagtggaacaatttcagcacactgcaacctctgcctcccaggctcaaatgatcatcccacctaagcctccggagtagctgggaccacaggcaagcgccaccatgcccagctgataccaatgtcttttaaaaaatgttgtatgtggaaataaattgagacttatagaaaagctgcaaaaatagtgcagtttctatatatccttcccccatctttggctagtgttaacaatctacataaccgcagtacgatgatcaaggctaggaaattaacattggcacagtactgttaatgaaaccatgctttgttttgagattcccacagttttgcctttttctgttccaagatcctatccaggatcccacgttgcatttcattgtcatgtctccttctcctctaacctctgacaatgcatcattctttccatgtcttttgtgatgttgacacttttgaagaggactggtccagatttttgtacactgtccctcagtttgggattgtctgctgttttctcatgaacagatagaggttttgcatttttgacaagaatcctcagaagagatgcacccttctcagtgcactgtagcaaggggcgcatgctgtcaatgtcttactggtgatgttaactttgatcgcttttgattcagatagtatctgctgggtttttccactgtaaagttactattttttccattgtaattaataaataacttgaggga

SEQ ID NO: 78 - DNA, 1371 bp, Homo sapiens
agaagaggaagacaggaagggggtggggatgtgaagcgaccgtcccagccttccccgcccgccacccccaccccaactcggcagccgtcacgtgatgcctggagtgggaggtggggagaaaaggcgagacttttgtgggtgctcccgatcgccagtagttccttcagtctcagccgccaactccggaggcgcggtgctcggcccgggagcgcgagcgggaggagcagagacccgcagccgggagcccgagcgcgggcgatgcaggctccgcgagcggcacctgcggctcctctaagctacgaccgtcgtctccgcggcagcagcgcgggccccagcagcctcggcagccacagccgctgcagccggggcagcctccgctgctgtcgcctcctctgatgcgcttgccctctcccggccccgggactccgggagaatgtgggtcctaggcatcgcggcaactttttgcggattgttcttgcttccaggctttgcgctgcaaatccagtgctaccagtgtgaagaattccagctgaacaacgactgctcctcccccgagttcattgtgaattgcacggtgaacgttcaagacatgtgtcagaaagaagtgatggagcaaagtgccgacagggtctcactgtgtcacgaggctggagtgcagtggaacaatttcagcacactgcaacctctgcctcccaggctcaaatgatcatcccacctaagcctccggagtagctgggaccacaggcaagcgccaccatgcccagctgataccaatgtcttttaaaaaatgttgtatgtggaaataaattgagacttatagaaaagctgcaaaaatagtgcagtttctatatatccttcccccatctttggctagtgttaacaatctacataaccgcagtacgatgatcaaggctaggaaattaacattggcacagtactgttaatgaaaccatgctttgttttgagattcccacagttttgcctttttctgttccaagatcctatccaggatcccacgttgcatttcattgtcatgtctccttctcctctaacctctgacaatgcatcattctttccatgtcttttgtgatgttgacacttttgaagaggactggtccagatttttgtacactgtccctcagtttgggattgtctgctgttttctcatgaacagatagaggttttgcatttttgacaagaatcctcagaagagatgcacccttctcagtgcactgtagcaaggggcgcatgctgtcaatgtcttactggtgatgttaactttgatcgcttttgattcagatagtatctgctgggtttttccactgtaaagttactattttttccattgtaattaataaataacttgaggga

SEQ ID NO: 79 - DNA, 2213 bp, Homo sapiens
agaagaggaagacaggaagggggtggggatgtgaagcgaccgtcccagccttccccgcccgccacccccaccccaactcggcagccgtcacgtgatgcctggagtgggaggtggggagaaaaggcgagacttttgtgggtgctcccgatcgccagtagttccttcagtctcagccgccaactccggaggcgcggtgctcggcccgggagcgcgagcgggaggagcagagacccgcagccgggagcccgagcgcgggcgatgcaggctccgcgagcggcacctgcggctcctctaagctacgaccgtcgtctccgcggcagcagcgcgggccccagcagcctcggcagccacagccgctgcagccggggcagcctccgctgctgtcgcctcctctgatgcgcttgccctctcccggccccgggactccgggagaatgtgggtcctaggcatcgcggcaactttttgcggattgttcttgcttccaggctttgcgctgcaaatccagtgctaccagtgtgaagaattccagctgaacaacgactgctcctcccccgagttcattgtgaattgcacggtgaacgttcaagacatgtgtcagaaagaagtgatggagcaaagtgccgacactaaaagaacaaacaccttgctcttcgagatgagacattttgccaagcagttgaccacttagttctcaagaagcaactatctctttcatgtgccttctgaggaagtattcagagggggaatatcaaatgtctttcccttggactctcccaggatcatgtaccgcaagtcctgtgcatcatcagcggcctgtctcatcgcctctgccgggtaccagtccttctgctccccagggaaactgaactcagtttgcatcagctgctgcaacacccctctttgtaacgggccaaggcccaagaaaaggggaagttctgcctcggccctcaggccagggctccgcaccaccatcctgttcctcaaattagccctcttctcggcacactgctgaagctgaaggagatgccaccccctcctgcattgttcttccagccctcgcccccaaccccccacctccctgagtgagtttcttctgggtgtccttttattctgggtagggagcgggagtccgtgttctcttttgttcctgtgcaaataatgaaagagctcggtaaagcattctgaataaattcagcctgactgaattttcagtatgtacttgaaggaaggaggtggagtgaaagttcacccccatgtctgtgtaaccggagtcaaggccaggctggcagagtcagtccttagaagtcactgaggtgggcatctgccttttgtaaagcctccagtgtccattccatccctgatgggggcatagtttgagactgcagagtgagagtgacgttttcttagggctggagggccagttcccactcaaggctccctcgcttgacattcaaacttcatgctcctgaaaaccattctctgcagcagaattggctggtttcgcgcctgagttgggctctagtgactcgagactcaatgactgggacttagactggggctcggcctcgctctgaaaagtgcttaagaaaatcttctcagttctccttgcagaggactggcgccgggacgcgaagagcaacgggcgctgcacaaagcgggcgctgtcggtggtggagtgcgcatgtacgcgcaggcgcttctcgtggttggcgtgctgcagcgacaggcggcagcacagcacctgcacgaacacccgccgaaactgctgcgaggacaccgtgtacaggagcgggttgatgaccgagctgaggtagaaaaacgtctccgagaaggggaggaggatcatgtacgcccggaagtaggacctcgtccagtcgtgcttgggtttggccgcagccatgatcctccgaatctggttgggcatccagcatacggccaatgtcacaacaatcagccctgggcagacacgagcaggagggagagacagagaaaagaaaaacacagcatgagaacacagtaaataaataaaaccataaaatatttagcccctctgttctgtgcttactggccaggaaatggtaccaatttttcagtgttggacttgacagcttcttttgccacaagcaagagagaatttaacactgtttcaaacccgggggagttggctgtgttaaagaaagaccattaaatgctttagacagtgtatttatacc

SEQ ID NO: 80 - DNA, 2247 bp, Homo sapiens
agaagaggaagacaggaagggggtggggatgtgaagcgaccgtcccagccttccccgcccgccacccccaccccaactcggcagccgtcacgtgatgcctggagtgggaggtggggagaaaaggcgagacttttgtgggtgctcccgatcgccagtagttccttcagtctcagccgccaactccggaggcgcggtgctcggcccgggagcgcgagcgggaggagcagagacccgcagccgggagcccgagcgcgggcgatgcaggctccgcgagcggcacctgcggctcctctaagctacgaccgtcgtctccgcggcagcagcgcgggccccagcagcctcggcagccacagccgctgcagccggggcagcctccgctgctgtcgcctcctctgatgcgcttgccctctcccggccccgggactccgggagaatgtgggtcctaggcatcgcggcaactttttgcggattgttcttgcttccaggtgagaatacccagaggccagcagccgaggccaggctttgcgctgcaaatccagtgctaccagtgtgaagaattccagctgaacaacgactgctcctcccccgagttcattgtgaattgcacggtgaacgttcaagacatgtgtcagaaagaagtgatggagcaaagtgccgacactaaaagaacaaacaccttgctcttcgagatgagacattttgccaagcagttgaccacttagttctcaagaagcaactatctctttcatgtgccttctgaggaagtattcagagggggaatatcaaatgtctttcccttggactctcccaggatcatgtaccgcaagtcctgtgcatcatcagcggcctgtctcatcgcctctgccgggtaccagtccttctgctccccagggaaactgaactcagtttgcatcagctgctgcaacacccctctttgtaacgggccaaggcccaagaaaaggggaagttctgcctcggccctcaggccagggctccgcaccaccatcctgttcctcaaattagccctcttctcggcacactgctgaagctgaaggagatgccaccccctcctgcattgttcttccagccctcgcccccaaccccccacctccctgagtgagtttcttctgggtgtccttttattctgggtagggagcgggagtccgtgttctcttttgttcctgtgcaaataatgaaagagctcggtaaagcattctgaataaattcagcctgactgaattttcagtatgtacttgaaggaaggaggtggagtgaaagttcacccccatgtctgtgtaaccggagtcaaggccaggctggcagagtcagtccttagaagtcactgaggtgggcatctgccttttgtaaagcctccagtgtccattccatccctgatgggggcatagtttgagactgcagagtgagagtgacgttttcttagggctggagggccagttcccactcaaggctccctcgcttgacattcaaacttcatgctcctgaaaaccattctctgcagcagaattggctggtttcgcgcctgagttgggctctagtgactcgagactcaatgactgggacttagactggggctcggcctcgctctgaaaagtgcttaagaaaatcttctcagttctccttgcagaggactggcgccgggacgcgaagagcaacgggcgctgcacaaagcgggcgctgtcggtggtggagtgcgcatgtacgcgcaggcgcttctcgtggttggcgtgctgcagcgacaggcggcagcacagcacctgcacgaacacccgccgaaactgctgcgaggacaccgtgtacaggagcgggttgatgaccgagctgaggtagaaaaacgtctccgagaaggggaggaggatcatgtacgcccggaagtaggacctcgtccagtcgtgcttgggtttggccgcagccatgatcctccgaatctggttgggcatccagcatacggccaatgtcacaacaatcagccctgggcagacacgagcaggagggagagacagagaaaagaaaaacacagcatgagaacacagtaaataaataaaaccataaaatatttagcccctctgttctgtgcttactggccaggaaatggtaccaatttttcagtgttggacttgacagcttcttttgccacaagcaagagagaatttaacactgtttcaaacccgggggagttggctgtgttaaagaaagaccattaaatgctttagacagtgtatttatacc

SEQ ID NO: 81 - DNA, 9702 bp, Homo sapiens
ggcctgctctccccacctctccgcgctgagcagccacgtcggcggcggtccctggtccagggaggggcgtggcaaaggcccgtgcgcggtacgtgtcccgcccctcgctgcccggagcccggatgaagagtaacgccattaccgccggagccgccgagagccttagccgacggaaactggacactggaccggcagcgccatgagactcctcccccgcttgctgctgcttctcttactcgtgttccctgccactgtcttgttccgaggcggccccagaggcttgttagcagtggcacaagatcttacagaggatgaagaaacagtagaagattccataattgaggatgaagatgatgaagccgaggtagaagaagatgaacccacagatttggtagaagataaagaggaagaagatgtgtctggtgaacctgaagcttcaccgagtgcagatacaactatactgtttgtaaaaggagaagattttccagcaaataacattgtgaagttcctggtaggctttaccaacaagggtacagaagattttattgttgaatccttagatgcctcattccgttatcctcaggactaccagttttatatccagaatttcacagctcttcctctgaacactgtagtgccaccccagagacaggcaacttttgagtactctttcattcctgcagagcccatgggcggacgaccatttggtttggtcatcaatctgaactacaaagatttgaacggcaatgtattccaagatgcagtcttcaatcaaacagttacagttattgaaagagaggatgggttagatggagaaaccgtaagagacccatacagaaagtagaaatgggtacatcaagtcagaatgatgttgacatgagttggattcctcaggaaacattgaatcaaatcaataaagcttcaccaagaaggttgcccaggaaacgggcacagaagagatcagtgggatctgatgagtaaatgttcctttgtgcaacaattcggtctttacttaacctgccctaatatttttcggcctgatgggaattagtgcagagaagccatgtcaccatagaaggcaactcctacttgtgtgtggactgagcaatcagagtctgtggcgataatattgctgaaaatgcactgcattcatttttctaaagtaacaaatttggtttttttttaaaccattaaaatctatgtgtgtgcgtgtgtatgtatgtgagcagttggtcttaccagaatcattgttgaactacctgaaacaagtctttagaatactaaatataatgctgttgtctcttcctttttgacattttctgatttttttcccccaaaactcagttaatatttacccactatgattattgatgtcctgccttgaacagttttaaagaaaacaatttttggaatagctcaaatttcaattgatggcacaaatcagcattttgttgttgttactgtattacaattagtattctaaaggcagaagcagaagtagctgctttttagcaatagaattgtttcagtattttgctgctgtttaatgcgcatcttcagaaaacttcccagtggcttcaaggaatttggggatctctctggcaacaaattgtgaaacatgaaatttctgctgactttaatatatgaaacctaatcctacccccttttttaacaaaaagaaactagtacatttgtgaaaattgtgttgtgttgtccattgttgctctagttctgacccagaggtagctctggagtgattttagacctactcactcagttgtgtgtaggtttttttgttttgttttgagagagaatttttctctccttaatagaagcatcctttttaaagagaagttgccttggtccacacactaagcagaaaaccaagttatcaggacagagatatttcccagttactcctaatcaatgaagaaagtgagttggatatttttaaagcagttaactaattttttcttacctaatcttttgggagttttgcttgttgatataacctttttagttaacctgaaagattccaaaaattgttcttaagtgcttgagactggaaccaaaattaaattgtacttcataaaatcctcttatagagttactcttgccctagattgtaaattaagtttggcattattgtcagactggatggagggtgaagtaaaatagtatgaacaattaagaggctctccccctcttgtctttaagccatattctcctacatgtattttataagaaaatgttaagtcaaattttagtggctctttaattcctgacctcttcattctccttttcagtataacctcccctatgctcatgcccacacagacaaaaaaacaaaacgaaatacacacagaaaaaagtctttccaaactgtttaagtatttaaacatctgagccaaagcagatagaagttattgtataattgttaatcactttgcaaataggggctatcaaattacctatattggcattgctggattataaactctatatctgtaatataaagtgtttgagtttttaattgggctgttatgatcagtagttgattttgagaaagctctatgagctctaagtaactgcatggttttttgtttaatgtaatataggagacccttcacattcccaaggaatatattccaaaacatttttgtgaatatctaagtttgtgaaactactagggcatgatacagtaaggtgtaattacagaatttacgaaatgtaaatggcctctacagagttttatggaatacctggtactaacgtaggcagctgcaaaaccacactgagttacagctgtcagccctcctcattcctaaataacttgccttacatatcagccctcccacttctgaagttcaaattagtgcctcggaaatgtagaatttattatttgtcatttttttttttttagcatagattgagaacagttgaactcttaaatcctcagatgccaggggtctgctctagcatcagtaagtatttagcagaaactaactccgtaatgaatggaattcaattccacacatggtttgttcaagcacacttaataagtagcctattttttaaatgtctttttaaaatgtaaatatttggatgaagtttttctttgttttgatatattcatttgctacaccaactatgttttcagaattcatcttttgaacaacttggtttcagaatatgtaaaatgactttaaggatcttgtgtatcaaacctatccccggatgtgtgagaataatgtgttcataaagcatggatctcgctttggttgtatagcttcctcatttacttcatggtcttacatagctggtgactttcagggctaatctgccctctaaagcattgtcccaggagaggaaaaggaaatgggacctcagaagtagaagcctcagggaaggagtaaagtagaaatcagaagaaaagaagcttcacttgatagtaataaggtttttaacttcaagtaccttcagaaaatgtgattttgataagaggaaagggcaaatttagaccttaaaaaatatggaagaactactgccttaaaagtgcatttgtagcacatcagcctagaactgtatcatggctgtgctggggagaagtaaatggtggtaatgtaacattgccacctttacttaatgatgtgttattttcgaggtacagtagatcaatatagtaataggcgagcctcatatatagcattcatcttgtacaatgatatccatacccttgatatgaaggaaaattgacttggtttgtgcatttgaatactgaaataattttttaaaactcagtgacacataccatctcttgccaagactagaccctgtattttagttcctaaattagatgtttaaatttaaaaacattttcagatgtacttaagtacttccatagtacttttttttttttttttttttttgccccctgagacggagtctctgtgtcacccaggctggagtgcagtggtgcgatctcggctcactgcaacttctgcctcttgggttcaagcagttctccctgtctcagcctcctgagtagcttggattacaggcgcccgtcaccgcacctgcctaatttttgcatttttagtagagacggggtttcgtcatttggccaggctggtcttgaactcctgaccacaggtgatacgcctgccttggcctcccaaagtgtgctgggattacaggcgtgagccactgtgcccggcccactgttcactttttgaatggcatcattttatagctgtagaactaaaatcaatgtttgccccaattttcttaagtaaaactctactttgagctcttacctccaacttagtaaaaagcagcttcacacacaaacaagattcttactggtggaatgttaggtttcgttgttaagttaatctgtctataagctcatccttagaggatatttgaggaggaagaacaccttgcagctgacttgcaaacatctaaataatttatttcgggtgcttatgaatgttactaatggattttgtatgaatttttatcccttttcatttatacaaaaacctgggcttttatgttaattatatcatctgaggttctaaggttttttttttagattttgaaatttagggataatagctcttaggtttgggtaccactttgctgcagtttaagaaagggggaagggaactcatttattaaacatcaatcacgtgctgtgttctgtttgttttctagtcatcatatcacacacctttacgacagctcactgaaggaaggtgatactgttcccattttgtagatggaatagacaaaacctgaatttaagtagcttgctcaaggttccatattgaatatggaaagttcaaatcatctcagtaatgaatataccatatatacttgctgtattgtatctatgataattcagttacccacaatacccttttaaatttctgttaatgacatacctttaaatgtctccttgatgaacagaatcatggtctttaaaaacattttcatgggttgattgcattttcaagctctaaaggattgaaagataaatcttcacgttaaaggtgagagtgaagtatctgctcttgggttacagaaccagatagtactagaactaagattacagggtaaagctgcttttatcttttttctttttctttttcttttttttttgacatggggtctcactgtattgcccaggctggaatgcagtggcatgatctcagctcacggcagcctctgcctcttgggctcaagcgattctcctgcttcagctttccaagtatttgggaccacaggcgcacaccacaggcctggctaatgtttttgttttgtttttggtagagacggggtttcaccatgttgccaggctggtctcgaactcctgagctcaagtgattcacccaccttggcctcacaaagtgtcaggcttacaggcgtgagccactgcgcccggctcacagggtaaggcttctgtctggtgtgttgtattacggattttgcttaataggcacagtgaggcattaaaaagaaaattcagtatgcctgtagaaaggataatccttgtttaaagtctccaaattgcagtcaaagatgttttgactgtgcctttttttgttcccctgctgtcccttatgtagacttctgtcagtacccatggcagcctgtcatcttgttgacatctccttctggactgtgagctctgtatctggcttgtttttcatccccagcttctagttcacaattaggtagaaccctattactctttgaagaaggaacaagaaaatgtgggccagttttcatttgccattcttccatgtgagttagtatggttcgtaagtattcctggtgatacgctagtattggcaattctgtgaggttgaacaaaggggtggtatggtgtgctagcgtgggaattaggagacctctgggtcttgacagtgccctggccactaagcaaaggcagttcatccttggagtctcaatgtgcttttttgttaattgagatatgcttgaagtatcagccctaaatagtctgattctgtgacctacaaacccttacttaattcagtgttactataaatgattcttcccttaaacctactttttacttagcaaaagagaaaaaaaaaaaaaggaaacgctcatgtcaggctgcctgggtttgaaccccagatcccctcttagttggaggcaagttgtatgatgcttcagcttttggttcctgcctcctaaggttgttaggagttactgtgtgtagctgcttagaacattgcctgggtctcagtaagccgcttaagtgactgctctcattttcgctgtaaagcaccatactgtaataacatcccatgaagcatggggcggggaagagtatatggtaccttatggactttgatgtggtggggtagtaggtaaattctgaatatgtaagctacatagtattctttttgtaactaaaggataaaagttttaagatgggcatgtaatatggctagcactggattttaatgatgagccagagtaataaggctggcaaggggagtttttgttttgtaataaatctcttacacctgcacatccagttctttttaaaaacacgtttgaagaggctccatatttctcagtgaagctgttggggttcatgttatttttgaaaatcatcttgcaatttatttcagcatcagactgaaccacccaaagaaaattagtctatttctgaacagttttttcagaaaccatattggtctgatcacccaacatttatagaaataggcgcttaaggcctagaggcatttcagaaaggagaatgagaaatactgtggtcaagagtagtgttcagatggagaacatcaagcatctgctctgcccttccacacacatcctcatttcatcttcacaactgccctaggtaaccttgttatctgtaatgaaacagcctcaaggagcacagaggcactcactcctcacgtttggtctgttgccatttccggcttggttggaatagggtaggagccttttggcagggagcacattctcagtaatgcagagtgcactcacctgggttctagcttcaacacttaggatttgcttgatattttgtattctctgaggcactgcctgtatttgtttctgctatcacagtccagagtcaagcttcatttataaagactgggcagggcatggtggctcactcctgtaattccagcactttgggaggctgaggtgggtggatcactttaggtcaggagttcaagaccagcctggccaacatggtgaaaccccatctctactaaaaaatacaaaaaggccgggcacggtggctcacacctgtaatcccaacactttgggaggccaaggtgggcagaacacctgaggtcaggagttcaagaccatcctggcgaacatagtgaaacctcgcctctactaaaaatacaaaaattagccaggtgtggtggtgcatgcctgtaatcccagctacttgggaggctgaggcaggagaattgcttaaacctgggaggtggagattgtggtgagctgagatcgtgccactgcactccagcctgggagatagaacgagactccatctcaaaaaagaacaaaaacaattagccgagcgaggtggtgcacgcctgtaatcccagctactcatgaggctgaggcaggagaatcacttgaacccaggaggaggaggttgtagtgagtcaaggttgcaccactgcactccagcctgggtgacagagtgagactgtctcaaaaaataagtacataaataataagtaaaagctactaacaattaaaaaataaataaataaagacaagactgtctggaaaatggctctcctaaaaggaccagttgccatcatccacagtggaagattcaaagcagttggtccttggtacgtatgagaagcggatttcattcccttgaattctacagagcagtttattagagtgaatgcattttaaggccttgcatttgatatgtcatccagttcataatcaagttgcctttttctggctaaaacataatgattatgtatttttctcatttggtcctacaagctgctggccctttgtccctccactgtgggaatcagatctagagcaggctgagcctgcagacacagcagtggccaaaaggtcactctaagtgttttgtcttgactccttacttgaagtccacccagctagcacacatctggtttatactgaagccccctgcctagaaatactcatttcaggaaccaccagtaagcatctgtgaccacacaggctttttgactgatggcttcccggatctggtttcaagggataaccccgtctgtgtgcatctatggtcttctctctacagcgaggactttgcagtgctgcttgtggtccacacaaggggctcagagctgagtctgaactgcttcatggtcaccagctcctgtcccttccagtcttgagaggcttttttctccagatggaacctttccttcccgccgttttctcggtctctggctgtttttctcttgtgcccgtctaattggacacctcctggcttccatctctgtggttctcctgcctcacttcctgttctgttgtttttccgttttgtcaaaatatctcctatgttcttggcttccttttcgtcgccaggttttcagctttcctttagctcttcttctaatatggcttctgcccacaaaagcctgctctgtcaggatctcatggttctccacttgccagaaccttcttcagcctcagttcctcggcctcaacttgtacgtttaacccattgaccaccaccccccaaattcaccttcatttctttgaccctgctcctcactccttttctgttgaggaatctgttgactaactccaggctcactcaggctcaccgtcctgctctctgcaccagcctttccagagcgtgccagttctcatggcttcatctgttaactgttgatcgcttcagtcctgatttttagacctaaatggtttccttaacgccattctaactgcctgtgactcattttcacttacagtgtttattgtaacgccaaaccaacaaatcacaggtgcttgcttctctccataaatctccccagtctaactttttgtcattcaacatgactcgtttatccaacctgaaatcgcatatagccccaagtatggtgttttgtacacaggtatttaataagtgacttccagttttggctctgctatgaataaaaagagatttcagttctcttcactttgaaatctaacaactcagagaacattgaagaaattggaatttagttgggatgaaatacttgtggtttaaaatatttctgttcatattttctaatttgttgccggaggtcttgggttttctatttgagtgcttgcaaactcaatgtgatttctgtcagcatatcttaggtttgtttgttatgaaacttatgcagtgtgaggttctatctgaaaatgttatttagctatcttctgggactatttaatgaaagtggggtcatgaatccttaaaattcttgtgcagctttgagaaacatttctgttatttgggtatcagtttgtaagtgtggtaaagccaagatggaaacgagcactttgctttcttggttgttgttactggtctaacctcctgcttgaactagtctgctgtcctgtcaaatgcatctttttatttacatgtcccttaaattaaagctgatcatgaaagta

SEQ ID NO: 82 - DNA, 9608 bp, Homo sapiens
ggcctgctctccccacctctccgcgctgagcagccacgtcggcggcggtccctggtccagggaggggcgtggcaaaggcccgtgcgcggtacgtgtcccgcccctcgctgcccggagcccggatgaagagtaacgccattaccgccggagccgccgagagccttagccgacggaaactggacactggaccggcagcgccatgagactcctcccccgcttgctgctgcttctcttactcgtgttccctgccactgtcttgttccgaggcggccccagaggcttgttagcagtggcacaagatcttacagaggatgaagaaacagtagaagattccataattgaggatgaagatgatgaagccgaggtagaagaagatgaacccacagatttggtagaagataaagaggaagaagatgtgtctggtgaacctgaagcttcaccgagtgcagatacaactatactgtttgtaaaaggagaagattttccagcaaataacattgtgaagttcctggtaggctttaccaacaagggtacagaagattttattgttgaatccttagatgcctcattccgttatcctcaggactaccagttttatatccagaatttcacagctcttcctctgaacactgtagtgccaccccagagacaggcaacttttgagtactctttcattcctgcagagcccatgggcggacgaccatttggtttggtcatcaatctgaactacaaagatttgaacggcaatgtattccaagatgcagtcttcaatcaaacagttacagttattgaaagagaggatgggttagatggagaaacataaagcttcaccaagaaggttgcccaggaaacgggcacagaagagatcagtgggatctgatgagtaaatgttcctttgtgcaacaattcggtctttacttaacctgccctaatatttttcggcctgatgggaattagtgcagagaagccatgtcaccatagaaggcaactcctacttgtgtgtggactgagcaatcagagtctgtggcgataatattgctgaaaatgcactgcattcatttttctaaagtaacaaatttggtttttttttaaaccattaaaatctatgtgtgtgcgtgtgtatgtatgtgagcagttggtcttaccagaatcattgttgaactacctgaaacaagtctttagaatactaaatataatgctgttgtctcttcctttttgacattttctgatttttttcccccaaaactcagttaatatttacccactatgattattgatgtcctgccttgaacagttttaaagaaaacaatttttggaatagctcaaatttcaattgatggcacaaatcagcattttgttgttgttactgtattacaattagtattctaaaggcagaagcagaagtagctgctttttagcaatagaattgtttcagtattttgctgctgtttaatgcgcatcttcagaaaacttcccagtggcttcaaggaatttggggatctctctggcaacaaattgtgaaacatgaaatttctgctgactttaatatatgaaacctaatcctacccccttttttaacaaaaagaaactagtacatttgtgaaaattgtgttgtgttgtccattgttgctctagttctgacccagaggtagctctggagtgattttagacctactcactcagttgtgtgtaggtttttttgttttgttttgagagagaatttttctctccttaatagaagcatcctttttaaagagaagttgccttggtccacacactaagcagaaaaccaagttatcaggacagagatatttcccagttactcctaatcaatgaagaaagtgagttggatatttttaaagcagttaactaattttttcttacctaatcttttgggagttttgcttgttgatataacctttttagttaacctgaaagattccaaaaattgttcttaagtgcttgagactggaaccaaaattaaattgtacttcataaaatcctcttatagagttactcttgccctagattgtaaattaagtttggcattattgtcagactggatggagggtgaagtaaaatagtatgaacaattaagaggctctccccctcttgtctttaagccatattctcctacatgtattttataagaaaatgttaagtcaaattttagtggctctttaattcctgacctcttcattctccttttcagtataacctcccctatgctcatgcccacacagacaaaaaaacaaaacgaaatacacacagaaaaaagtctttccaaactgtttaagtatttaaacatctgagccaaagcagatagaagttattgtataattgttaatcactttgcaaataggggctatcaaattacctatattggcattgctggattataaactctatatctgtaatataaagtgtttgagtttttaattgggctgttatgatcagtagttgattttgagaaagctctatgagctctaagtaactgcatggttttttgtttaatgtaatataggagacccttcacattcccaaggaatatattccaaaacatttttgtgaatatctaagtttgtgaaactactagggcatgatacagtaaggtgtaattacagaatttacgaaatgtaaatggcctctacagagttttatggaatacctggtactaacgtaggcagctgcaaaaccacactgagttacagctgtcagccctcctcattcctaaataacttgccttacatatcagccctcccacttctgaagttcaaattagtgcctcggaaatgtagaatttattatttgtcatttttttttttttagcatagattgagaacagttgaactcttaaatcctcagatgccaggggtctgctctagcatcagtaagtatttagcagaaactaactccgtaatgaatggaattcaattccacacatggtttgttcaagcacacttaataagtagcctattttttaaatgtctttttaaaatgtaaatatttggatgaagtttttctttgttttgatatattcatttgctacaccaactatgttttcagaattcatcttttgaacaacttggtttcagaatatgtaaaatgactttaaggatcttgtgtatcaaacctatccccggatgtgtgagaataatgtgttcataaagcatggatctcgctttggttgtatagcttcctcatttacttcatggtcttacatagctggtgactttcagggctaatctgccctctaaagcattgtcccaggagaggaaaaggaaatgggacctcagaagtagaagcctcagggaaggagtaaagtagaaatcagaagaaaagaagcttcacttgatagtaataaggtttttaacttcaagtaccttcagaaaatgtgattttgataagaggaaagggcaaatttagaccttaaaaaatatggaagaactactgccttaaaagtgcatttgtagcacatcagcctagaactgtatcatggctgtgctggggagaagtaaatggtggtaatgtaacattgccacctttacttaatgatgtgttattttcgaggtacagtagatcaatatagtaataggcgagcctcatatatagcattcatcttgtacaatgatatccatacccttgatatgaaggaaaattgacttggtttgtgcatttgaatactgaaataattttttaaaactcagtgacacataccatctcttgccaagactagaccctgtattttagttcctaaattagatgtttaaatttaaaaacattttcagatgtacttaagtacttccatagtacttttttttttttttttttttttgccccctgagacggagtctctgtgtcacccaggctggagtgcagtggtgcgatctcggctcactgcaacttctgcctcttgggttcaagcagttctccctgtctcagcctcctgagtagcttggattacaggcgcccgtcaccgcacctgcctaatttttgcatttttagtagagacggggtttcgtcatttggccaggctggtcttgaactcctgaccacaggtgatacgcctgccttggcctcccaaagtgtgctgggattacaggcgtgagccactgtgcccggcccactgttcactttttgaatggcatcattttatagctgtagaactaaaatcaatgtttgccccaattttcttaagtaaaactctactttgagctcttacctccaacttagtaaaaagcagcttcacacacaaacaagattcttactggtggaatgttaggtttcgttgttaagttaatctgtctataagctcatccttagaggatatttgaggaggaagaacaccttgcagctgacttgcaaacatctaaataatttatttcgggtgcttatgaatgttactaatggattttgtatgaatttttatcccttttcatttatacaaaaacctgggcttttatgttaattatatcatctgaggttctaaggttttttttttagattttgaaatttagggataatagctcttaggtttgggtaccactttgctgcagtttaagaaagggggaagggaactcatttattaaacatcaatcacgtgctgtgttctgtttgttttctagtcatcatatcacacacctttacgacagctcactgaaggaaggtgatactgttcccattttgtagatggaatagacaaaacctgaatttaagtagcttgctcaaggttccatattgaatatggaaagttcaaatcatctcagtaatgaatataccatatatacttgctgtattgtatctatgataattcagttacccacaatacccttttaaatttctgttaatgacatacctttaaatgtctccttgatgaacagaatcatggtctttaaaaacattttcatgggttgattgcattttcaagctctaaaggattgaaagataaatcttcacgttaaaggtgagagtgaagtatctgctcttgggttacagaaccagatagtactagaactaagattacagggtaaagctgcttttatcttttttctttttctttttcttttttttttgacatggggtctcactgtattgcccaggctggaatgcagtggcatgatctcagctcacggcagcctctgcctcttgggctcaagcgattctcctgcttcagctttccaagtatttgggaccacaggcgcacaccacaggcctggctaatgtttttgttttgtttttggtagagacggggtttcaccatgttgccaggctggtctcgaactcctgagctcaagtgattcacccaccttggcctcacaaagtgtcaggcttacaggcgtgagccactgcgcccggctcacagggtaaggcttctgtctggtgtgttgtattacggattttgcttaataggcacagtgaggcattaaaaagaaaattcagtatgcctgtagaaaggataatccttgtttaaagtctccaaattgcagtcaaagatgttttgactgtgcctttttttgttcccctgctgtcccttatgtagacttctgtcagtacccatggcagcctgtcatcttgttgacatctccttctggactgtgagctctgtatctggcttgtttttcatccccagcttctagttcacaattaggtagaaccctattactctttgaagaaggaacaagaaaatgtgggccagttttcatttgccattcttccatgtgagttagtatggttcgtaagtattcctggtgatacgctagtattggcaattctgtgaggttgaacaaaggggtggtatggtgtgctagcgtgggaattaggagacctctgggtcttgacagtgccctggccactaagcaaaggcagttcatccttggagtctcaatgtgcttttttgttaattgagatatgcttgaagtatcagccctaaatagtctgattctgtgacctacaaacccttacttaattcagtgttactataaatgattcttcccttaaacctactttttacttagcaaaagagaaaaaaaaaaaaaggaaacgctcatgtcaggctgcctgggtttgaaccccagatcccctcttagttggaggcaagttgtatgatgcttcagcttttggttcctgcctcctaaggttgttaggagttactgtgtgtagctgcttagaacattgcctgggtctcagtaagccgcttaagtgactgctctcattttcgctgtaaagcaccatactgtaataacatcccatgaagcatggggcggggaagagtatatggtaccttatggactttgatgtggtggggtagtaggtaaattctgaatatgtaagctacatagtattctttttgtaactaaaggataaaagttttaagatgggcatgtaatatggctagcactggattttaatgatgagccagagtaataaggctggcaaggggagtttttgttttgtaataaatctcttacacctgcacatccagttctttttaaaaacacgtttgaagaggctccatatttctcagtgaagctgttggggttcatgttatttttgaaaatcatcttgcaatttatttcagcatcagactgaaccacccaaagaaaattagtctatttctgaacagttttttcagaaaccatattggtctgatcacccaacatttatagaaataggcgcttaaggcctagaggcatttcagaaaggagaatgagaaatactgtggtcaagagtagtgttcagatggagaacatcaagcatctgctctgcccttccacacacatcctcatttcatcttcacaactgccctaggtaaccttgttatctgtaatgaaacagcctcaaggagcacagaggcactcactcctcacgtttggtctgttgccatttccggcttggttggaatagggtaggagccttttggcagggagcacattctcagtaatgcagagtgcactcacctgggttctagcttcaacacttaggatttgcttgatattttgtattctctgaggcactgcctgtatttgtttctgctatcacagtccagagtcaagcttcatttataaagactgggcagggcatggtggctcactcctgtaattccagcactttgggaggctgaggtgggtggatcactttaggtcaggagttcaagaccagcctggccaacatggtgaaaccccatctctactaaaaaatacaaaaaggccgggcacggtggctcacacctgtaatcccaacactttgggaggccaaggtgggcagaacacctgaggtcaggagttcaagaccatcctggcgaacatagtgaaacctcgcctctactaaaaatacaaaaattagccaggtgtggtggtgcatgcctgtaatcccagctacttgggaggctgaggcaggagaattgcttaaacctgggaggtggagattgtggtgagctgagatcgtgccactgcactccagcctgggagatagaacgagactccatctcaaaaaagaacaaaaacaattagccgagcgaggtggtgcacgcctgtaatcccagctactcatgaggctgaggcaggagaatcacttgaacccaggaggaggaggttgtagtgagtcaaggttgcaccactgcactccagcctgggtgacagagtgagactgtctcaaaaaataagtacataaataataagtaaaagctactaacaattaaaaaataaataaataaagacaagactgtctggaaaatggctctcctaaaaggaccagttgccatcatccacagtggaagattcaaagcagttggtccttggtacgtatgagaagcggatttcattcccttgaattctacagagcagtttattagagtgaatgcattttaaggccttgcatttgatatgtcatccagttcataatcaagttgcctttttctggctaaaacataatgattatgtatttttctcatttggtcctacaagctgctggccctttgtccctccactgtgggaatcagatctagagcaggctgagcctgcagacacagcagtggccaaaaggtcactctaagtgttttgtcttgactccttacttgaagtccacccagctagcacacatctggtttatactgaagccccctgcctagaaatactcatttcaggaaccaccagtaagcatctgtgaccacacaggctttttgactgatggcttcccggatctggtttcaagggataaccccgtctgtgtgcatctatggtcttctctctacagcgaggactttgcagtgctgcttgtggtccacacaaggggctcagagctgagtctgaactgcttcatggtcaccagctcctgtcccttccagtcttgagaggcttttttctccagatggaacctttccttcccgccgttttctcggtctctggctgtttttctcttgtgcccgtctaattggacacctcctggcttccatctctgtggttctcctgcctcacttcctgttctgttgtttttccgttttgtcaaaatatctcctatgttcttggcttccttttcgtcgccaggttttcagctttcctttagctcttcttctaatatggcttctgcccacaaaagcctgctctgtcaggatctcatggttctccacttgccagaaccttcttcagcctcagttcctcggcctcaacttgtacgtttaacccattgaccaccaccccccaaattcaccttcatttctttgaccctgctcctcactccttttctgttgaggaatctgttgactaactccaggctcactcaggctcaccgtcctgctctctgcaccagcctttccagagcgtgccagttctcatggcttcatctgttaactgttgatcgcttcagtcctgatttttagacctaaatggtttccttaacgccattctaactgcctgtgactcattttcacttacagtgtttattgtaacgccaaaccaacaaatcacaggtgcttgcttctctccataaatctccccagtctaactttttgtcattcaacatgactcgtttatccaacctgaaatcgcatatagccccaagtatggtgttttgtacacaggtatttaataagtgacttccagttttggctctgctatgaataaaaagagatttcagttctcttcactttgaaatctaacaactcagagaacattgaagaaattggaatttagttgggatgaaatacttgtggtttaaaatatttctgttcatattttctaatttgttgccggaggtcttgggttttctatttgagtgcttgcaaactcaatgtgatttctgtcagcatatcttaggtttgtttgttatgaaacttatgcagtgtgaggttctatctgaaaatgttatttagctatcttctgggactatttaatgaaagtggggtcatgaatccttaaaattcttgtgcagctttgagaaacatttctgttatttgggtatcagtttgtaagtgtggtaaagccaagatggaaacgagcactttgctttcttggttgttgttactggtctaacctcctgcttgaactagtctgctgtcctgtcaaatgcatctttttatttacatgtcccttaaattaaagctgatcatgaaagta

SEQ ID NO: 83 - DNA, 935 bp, Homo sapiens
ggcctgctctccccacctctccgcgctgagcagccacgtcggcggcggtccctggtccagggaggggcgtggcaaaggcccgtgcgcggtacgtgtcccgcccctcgctgcccggagcccggatgaagagtaacgccattaccgccggagccgccgagagccttagccgacggaaactggacactggaccggcagcgccatgagactcctcccccgcttgctgctgcttctcttactcgtgttccctgccactgtcttgttccgaggcggccccagaggcttgttagcagtggcacaagatcttacagaggatgaagaaacagtagaagattccataattgaggatgaagatgatgaagccgaggtagaagaagatgaacccacagatttggtagaagataaagaggaagaagatgtgtctggtgaacctgaagcttcaccgagtgcagatacaactatactgtttgtaaaaggagaagattttccagcaaataacattgtgaagttcctggtaggctttaccaacaagggtacagaagattttattgttgaatccttagatgcctcattccgttatcctcaggactaccagttttatatccagaatttcacagctcttcctctgaacactgtagtgccaccccagagacaggcaacttttgagtactctttcattcctgcagagcccatgggcggacgaccatttggtttggtcatcaatctgaactacaaagatttgaacgtaagatcctctaaaccttctttttgtttaagttagagatggatgggggcggtgacgttgtttaatagaatatatctgttcattcagttgcctgttttgtggttgaacctgtgatagccaccagggaagcaaagataaattgcacgtttcttcttcaagtctaatccagtgggggaggcatatgaaaacaggc

SEQ ID NO: 84 - DNA, 629 bp, Homo sapiens
ggcctgctctccccacctctccgcgctgagcagccacgtcggcggcggtccctggtccagggaggggcgtggcaaaggcccgtgcgcggtacgtgtcccgcccctcgctgcccggagcccggatgaagagtaacgccattaccgccggagccgccgagagccttagccgacggaaactggacactggaccggcagcgccatgagactcctcccccgcttgctgctgcttctcttactcgtgttccctgccactgtcttgttccgaggcggccccagaggcttgttagcagtggcacaagatcttacagaggatgaagaaacagtagaagattccataattgaggatgaagatgatgaagccgaggtagaagaagatgaacccacagatttggtagaagataaagaggaagaagatgtgtctggtgaacctgaagcttcaccgagtgcagatacaactatactgtttgtaaaaggagaaggtaatacagaagtattagttttaattcagatgtaggcattttaaaacgatgagcttgttcatatatatctgaatacccatatctgtaaagtaatattgttggcatttaaagggaatacgtaggtgatatagacacaataaaaaataaacc

SEQ ID NO: 85 - DNA, 3194 bp, Homo sapiens
caagcccagcagccccggggcggatggctccggccgcctggctccgcagcgcggccgcgcgcgccctcctgcccccgatgctgctgctgctgctccagccgccgccgctgctggcccgggctctgccgccggacgtccaccacctccatgccgagaggagggggccacagccctggcatgcagccctgcccagtagcccggcacctgcccctgccacgcaggaagccccccggcctgccagcagcctcaggcctccccgctgtggcgtgcccgacccatctgatgggctgagtgcccgcaaccgacagaagaggttcgtgctttctggcgggcgctgggagaagacggacctcacctacaggatccttcggttcccatggcagttggtgcaggagcaggtgcggcagacgatggcagaggccctaaaggtatggagcgatgtgacgccactcacctttactgaggtgcacgagggccgtgctgacatcatgatcgacttcgccaggtactggcatggggacgacctgccgtttgatgggcctgggggcatcctggcccatgccttcttccccaagactcaccgagaaggggatgtccacttcgactatgatgagacctggactatcggggatgaccagggcacagacctgctgcaggtggcagcccatgaatttggccacgtgctggggctgcagcacacaacagcagccaaggccctgatgtccgccttctacacctttcgctacccactgagtctcagcccagatgactgcaggggcgttcaacacctatatggccagccctggcccactgtcacctccaggaccccagccctgggcccccaggctgggatagacaccaatgagattgcaccgctggagccagacgccccgccagatgcctgtgaggcctcctttgacgcggtctccaccatccgaggcgagctctttttcttcaaagcgggctttgtgtggcgcctccgtgggggccagctgcagcccggctacccagcattggcctctcgccactggcagggactgcccagccctgtggacgctgccttcgaggatgcccagggccacatttggttcttccaaggtgctcagtactgggtgtacgacggtgaaaagccagtcctgggccccgcacccctcaccgagctgggcctggtgaggttcccggtccatgctgccttggtctggggtcccgagaagaacaagatctacttcttccgaggcagggactactggcgtttccaccccagcacccggcgtgtagacagtcccgtgccccgcagggccactgactggagaggggtgccctctgagatcgacgctgccttccaggatgctgatggtgcgttgggggtgaggcagctggtgggaggtgggcacagcagccgcttctcccacctggtggtggctgggctcccacatgcctgccacaggaagtctggctcttcatcacaggtcctttgtccagagccatctgccctcctctcggtggccggctagtgctacattccatattgcagatgaggaaactgagggtcagagaagtgcaaggtcttaccctggtttttcagccacagccagtagaacaataaactgctgtacactgagggccaacaatgctctaagctccttactggtctcatccagttctcagaacagccctctgatgtgacacctgttgtgaacccagtttccagaggagcaaacagaggctcaggcaatgaggcccctaacctggactaccctggtggtccctgctcctaaccactgacccacccagcctcccacaaccacagggggctagagccagtccagtgctccctcccctgctaggctcctcttctgtgctctttctcccacatcaggacccactgggagagctatcctagggtagcctccagctccaggactccagggtgcccgtcaatagcctggctaatttaatagatgcaggagagagtgatgtggagggtggtgggggcaacgggacttgctttcctgagaggtgggactcaggcctctgaggctctgggtacctgtcaggctgggtattagcccagcccagattccggggcaggcagaagggctccctagagggaagagaggttctgaaaggccggccctggatcctgcaggactcgaggaactcagcagtggccaagggcttcccactcagccctcccttagtgcccatccctgggcacagcctgacaggcaggagtagggcccagtgtccactcgcccaggcttgaccaccttctcttctcaggctatgcctacttcctgcgcggccgcctctactggaagtttgaccctgtgaaggtgaaggctctggaaggcttcccccgtctcgtgggtcctgacttctttggctgtgccgagcctgccaacactttcctctgaccatggcttggatgccctcaggggtgctgacccctgccaggccacgaatatcaggctagagacccatggccatctttgtggctgtgggcaccaggcatgggactgagcccatgtctcctcagggggatggggtggggtacaaccaccatgacaactgccgggagggccacgcaggtcgtggtcacctgccagcgactgtctcagactgggcagggaggctttggcatgacttaagaggaagggcagtcttgggcccgctatgcaggtcctggcaaacctggctgccctgtctccatccctgtccctcagggtagcaccatggcaggactgggggaactggagtgtccttgctgtatccctgttgtgaggttccttccaggggctggcactgaagcaagggtgctggggccccatggccttcagccctggctgagcaactgggctgtagggcagggccacttcctgaggtcaggtcttggtaggtgcctgcatctgtctgccttctggctgacaatcctggaaatctgttctccagaatccaggccaaaaagttcacagtcaaatggggaggggtattcttcatgcaggagaccccaggccctggaggctgcaacatacctcaatcctgtcccaggccggatcctcctgaagcccttttcgcagcactgctatcctccaaagccattgtaaatgtgtgtacagtgtgtataaaccttcttcttcttttttttttttaaactgaggattgtcattaaacacagttgttttctacctgcc

SEQ ID NO: 86 - DNA, 2705 bp, Homo sapiens
caagcccagcagccccggggcggatggctccggccgcctggctccgcagcgcggccgcgcgcgccctcctgcccccgatgctgctgctgctgctccagccgccgccgctgctggcccgggctctgccgccggacgtccaccacctccatgccgagaggagggggccacagccctggcatgcagccctgcccagtagcccggcacctgcccctgccacgcaggaagccccccggcctgccagcagcctcaggcctccccgctgtggcgtgcccgacccatctgatgggctgagtgcccgcaaccgacagaagaggttcgtgctttctggcgggcgctgggagaagacggacctcacctacaggatccttcggttcccatggcagttggtgcaggagcaggtgcggcagacgatggcagaggccctaaaggtatggagcgatgtgacgccactcacctttactgaggtgcacgagggccgtgctgacatcatgatcgacttcgccaggtactggcatggggacgacctgccgtttgatgggcctgggggcatcctggcccatgccttcttccccaagactcaccgagaaggggatgtccacttcgactatgatgagacctggactatcggggatgaccagggcacagacctgctgcaggtggcagcccatgaatttggccacgtgctggggctgcagcacacaacagcagccaaggccctgatgtccgccttctacacctttcgctacccactgagtctcagcccagatgactgcaggggcgttcaacacctatatggccagccctggcccactgtcacctccaggaccccagccctgggcccccaggctgggatagacaccaatgagattgcaccgctggagccagacgccccgccagatgcctgtgaggcctcctttgacgcggtctccaccatccgaggcgagctctttttcttcaaagcgggctttgtgtggcgcctccgtgggggccagctgcagcccggctacccagcattggcctctcgccactggcagggactgcccagccctgtggacgctgccttcgaggatgcccagggccacatttggttcttccaagagctgggatttccatcctcaactggcagagatgagagcctggagcattgcagatgccagggacttcacaaatgaaggcacagcatgggaaacctgcgtgggttccagggcagtccagcctgcaggggcccagggagtggtcagtaggcatttgtcacagccaaatgccagtggaaggagcagccgcccaggcagccctctactgatgagagtaacctcacccgtgcactagtttacagagcattcactgccccagcttatcccaggcctcccgcttccctctgcgggtggggtgctgagcaggcattattggcctgcatgttttactgatgaggaaactgaggctgggagagtctgtggtaggggtcaagcaggtccacagtggcggggcatggcagtggtggctgggcaggtccttgcagccttccctctccggcaggtgctcagtactgggtgtacgacggtgaaaagccagtcctgggccccgcacccctcaccgagctgggcctggtgaggttcccggtccatgctgccttggtctggggtcccgagaagaacaagatctacttcttccgaggcagggactactggcgtttccaccccagcacccggcgtgtagacagtcccgtgccccgcagggccactgactggagaggggtgccctctgagatcgacgctgccttccaggatgctgatggctatgcctacttcctgcgcggccgcctctactggaagtttgaccctgtgaaggtgaaggctctggaaggcttcccccgtctcgtgggtcctgacttctttggctgtgccgagcctgccaacactttcctctgaccatggcttggatgccctcaggggtgctgacccctgccaggccacgaatatcaggctagagacccatggccatctttgtggctgtgggcaccaggcatgggactgagcccatgtctcctcagggggatggggtggggtacaaccaccatgacaactgccgggagggccacgcaggtcgtggtcacctgccagcgactgtctcagactgggcagggaggctttggcatgacttaagaggaagggcagtcttgggcccgctatgcaggtcctggcaaacctggctgccctgtctccatccctgtccctcagggtagcaccatggcaggactgggggaactggagtgtccttgctgtatccctgttgtgaggttccttccaggggctggcactgaagcaagggtgctggggccccatggccttcagccctggctgagcaactgggctgtagggcagggccacttcctgaggtcaggtcttggtaggtgcctgcatctgtctgccttctggctgacaatcctggaaatctgttctccagaatccaggccaaaaagttcacagtcaaatggggaggggtattcttcatgcaggagaccccaggccctggaggctgcaacatacctcaatcctgtcccaggccggatcctcctgaagcccttttcgcagcactgctatcctccaaagccattgtaaatgtgtgtacagtgtgtataaaccttcttcttcttttttttttttaaactgaggattgtcattaaacacagttgttttctacctgcc

SEQ ID NO: 87 - DNA, 3332 bp, Homo sapiens
caagcccagcagccccggggcggatggctccggccgcctggctccgcagcgcggccgcgcgcgccctcctgcccccgatgctgctgctgctgctccagccgccgccgctgctggcccgggctctgccgccggacgtccaccacctccatgccgagaggagggggccacagccctggcatgcagccctgcccagtagcccggcacctgcccctgccacgcaggaagccccccggcctgccagcagcctcaggcctccccgctgtggcgtgcccgacccatctgatgggctgagtgcccgcaaccgacagaagaggttcgtgctttctggcgggcgctgggagaagacggacctcacctacaggatccttcggttcccatggcagttggtgcaggagcaggtgcggcagacgatggcagaggccctaaaggtatggagcgatgtgacgccactcacctttactgaggtgcacgagggccgtgctgacatcatgatcgacttcgccaggtactggcatggggacgacctgccgtttgatgggcctgggggcatcctggcccatgccttcttccccaagactcaccgagaaggggatgtccacttcgactatgatgagacctggactatcggggatgaccagggcacagacctgctgcaggtggcagcccatgaatttggccacgtgctggggctgcagcacacaacagcagccaaggccctgatgtccgccttctacacctttcgctacccactgagtctcagcccagatgactgcaggggcgttcaacacctatatggccagccctggcccactgtcacctccaggaccccagccctgggcccccaggctgggatagacaccaatgagattgcaccgctggagccagacgccccgccagatgcctgtgaggcctcctttgacgcggtctccaccatccgaggcgagctctttttcttcaaagcgggctttgtgtggcgcctccgtgggggccagctgcagcccggctacccagcattggcctctcgccactggcagggactgcccagccctgtggacgctgccttcgaggatgcccagggccacatttggttcttccaagagctgggatttccatcctcaactggcagagatgagagcctggagcattgcagatgccagggacttcacaaatgaaggcacagcatgggaaacctgcgtgggttccagggcagtccagcctgcaggggcccagggagtggtgctcagtactgggtgtacgacggtgaaaagccagtcctgggccccgcacccctcaccgagctgggcctggtgaggttcccggtccatgctgccttggtctggggtcccgagaagaacaagatctacttcttccgaggcagggactactggcgtttccaccccagcacccggcgtgtagacagtcccgtgccccgcagggccactgactggagaggggtgccctctgagatcgacgctgccttccaggatgctgatggtgcgttgggggtgaggcagctggtgggaggtgggcacagcagccgcttctcccacctggtggtggctgggctcccacatgcctgccacaggaagtctggctcttcatcacaggtcctttgtccagagccatctgccctcctctcggtggccggctagtgctacattccatattgcagatgaggaaactgagggtcagagaagtgcaaggtcttaccctggtttttcagccacagccagtagaacaataaactgctgtacactgagggccaacaatgctctaagctccttactggtctcatccagttctcagaacagccctctgatgtgacacctgttgtgaacccagtttccagaggagcaaacagaggctcaggcaatgaggcccctaacctggactaccctggtggtccctgctcctaaccactgacccacccagcctcccacaaccacagggggctagagccagtccagtgctccctcccctgctaggctcctcttctgtgctctttctcccacatcaggacccactgggagagctatcctagggtagcctccagctccaggactccagggtgcccgtcaatagcctggctaatttaatagatgcaggagagagtgatgtggagggtggtgggggcaacgggacttgctttcctgagaggtgggactcaggcctctgaggctctgggtacctgtcaggctgggtattagcccagcccagattccggggcaggcagaagggctccctagagggaagagaggttctgaaaggccggccctggatcctgcaggactcgaggaactcagcagtggccaagggcttcccactcagccctcccttagtgcccatccctgggcacagcctgacaggcaggagtagggcccagtgtccactcgcccaggcttgaccaccttctcttctcaggctatgcctacttcctgcgcggccgcctctactggaagtttgaccctgtgaaggtgaaggctctggaaggcttcccccgtctcgtgggtcctgacttctttggctgtgccgagcctgccaacactttcctctgaccatggcttggatgccctcaggggtgctgacccctgccaggccacgaatatcaggctagagacccatggccatctttgtggctgtgggcaccaggcatgggactgagcccatgtctcctcagggggatggggtggggtacaaccaccatgacaactgccgggagggccacgcaggtcgtggtcacctgccagcgactgtctcagactgggcagggaggctttggcatgacttaagaggaagggcagtcttgggcccgctatgcaggtcctggcaaacctggctgccctgtctccatccctgtccctcagggtagcaccatggcaggactgggggaactggagtgtccttgctgtatccctgttgtgaggttccttccaggggctggcactgaagcaagggtgctggggccccatggccttcagccctggctgagcaactgggctgtagggcagggccacttcctgaggtcaggtcttggtaggtgcctgcatctgtctgccttctggctgacaatcctggaaatctgttctccagaatccaggccaaaaagttcacagtcaaatggggaggggtattcttcatgcaggagaccccaggccctggaggctgcaacatacctcaatcctgtcccaggccggatcctcctgaagcccttttcgcagcactgctatcctccaaagccattgtaaatgtgtgtacagtgtgtataaaccttcttcttcttttttttttttaaactgaggattgtcattaaacacagttgttttctacctgcc

SEQ ID NO: 88 - DNA, 3052 bp, Homo sapiens
caagcccagcagccccggggcggatggctccggccgcctggctccgcagcgcggccgcgcgcgccctcctgcccccgatgctgctgctgctgctccagccgccgccgctgctggcccgggctctgccgccggacgtccaccacctccatgccgagaggagggggccacagccctggcatgcagccctgcccagtagcccggcacctgcccctgccacgcaggaagccccccggcctgccagcagcctcaggcctccccgctgtggcgtgcccgacccatctgatgggctgagtgcccgcaaccgacagaagaggttcgtgctttctggcgggcgctgggagaagacggacctcacctacaggatccttcggttcccatggcagttggtgcaggagcaggtgcggcagacgatggcagaggccctaaaggtatggagcgatgtgacgccactcacctttactgaggtgcacgagggccgtgctgacatcatgatcgacttcgccaggtactggcatggggacgacctgccgtttgatgggcctgggggcatcctggcccatgccttcttccccaagactcaccgagaaggggatgtccacttcgactatgatgagacctggactatcggggatgaccagggcacagacctgctgcaggtggcagcccatgaatttggccacgtgctggggctgcagcacacaacagcagccaaggccctgatgtccgccttctacacctttcgctacccactgagtctcagcccagatgactgcaggggcgttcaacacctatatggccagccctggcccactgtcacctccaggaccccagccctgggcccccaggctgggatagacaccaatgagattgcaccgctggagccagacgccccgccagatgcctgtgaggcctcctttgacgcggtctccaccatccgaggcgagctctttttcttcaaagcgggctttgtgtggcgcctccgtgggggccagctgcagcccggctacccagcattggcctctcgccactggcagggactgcccagccctgtggacgctgccttcgaggatgcccagggccacatttggttcttccaagggactactggcgtttccaccccagcacccggcgtgtagacagtcccgtgccccgcagggccactgactggagaggggtgccctctgagatcgacgctgccttccaggatgctgatggtgcgttgggggtgaggcagctggtgggaggtgggcacagcagccgcttctcccacctggtggtggctgggctcccacatgcctgccacaggaagtctggctcttcatcacaggtcctttgtccagagccatctgccctcctctcggtggccggctagtgctacattccatattgcagatgaggaaactgagggtcagagaagtgcaaggtcttaccctggtttttcagccacagccagtagaacaataaactgctgtacactgagggccaacaatgctctaagctccttactggtctcatccagttctcagaacagccctctgatgtgacacctgttgtgaacccagtttccagaggagcaaacagaggctcaggcaatgaggcccctaacctggactaccctggtggtccctgctcctaaccactgacccacccagcctcccacaaccacagggggctagagccagtccagtgctccctcccctgctaggctcctcttctgtgctctttctcccacatcaggacccactgggagagctatcctagggtagcctccagctccaggactccagggtgcccgtcaatagcctggctaatttaatagatgcaggagagagtgatgtggagggtggtgggggcaacgggacttgctttcctgagaggtgggactcaggcctctgaggctctgggtacctgtcaggctgggtattagcccagcccagattccggggcaggcagaagggctccctagagggaagagaggttctgaaaggccggccctggatcctgcaggactcgaggaactcagcagtggccaagggcttcccactcagccctcccttagtgcccatccctgggcacagcctgacaggcaggagtagggcccagtgtccactcgcccaggcttgaccaccttctcttctcaggctatgcctacttcctgcgcggccgcctctactggaagtttgaccctgtgaaggtgaaggctctggaaggcttcccccgtctcgtgggtcctgacttctttggctgtgccgagcctgccaacactttcctctgaccatggcttggatgccctcaggggtgctgacccctgccaggccacgaatatcaggctagagacccatggccatctttgtggctgtgggcaccaggcatgggactgagcccatgtctcctcagggggatggggtggggtacaaccaccatgacaactgccgggagggccacgcaggtcgtggtcacctgccagcgactgtctcagactgggcagggaggctttggcatgacttaagaggaagggcagtcttgggcccgctatgcaggtcctggcaaacctggctgccctgtctccatccctgtccctcagggtagcaccatggcaggactgggggaactggagtgtccttgctgtatccctgttgtgaggttccttccaggggctggcactgaagcaagggtgctggggccccatggccttcagccctggctgagcaactgggctgtagggcagggccacttcctgaggtcaggtcttggtaggtgcctgcatctgtctgccttctggctgacaatcctggaaatctgttctccagaatccaggccaaaaagttcacagtcaaatggggaggggtattcttcatgcaggagaccccaggccctggaggctgcaacatacctcaatcctgtcccaggccggatcctcctgaagcccttttcgcagcactgctatcctccaaagccattgtaaatgtgtgtacagtgtgtataaaccttcttcttcttttttttttttaaactgaggattgtcattaaacacagttgttttctacctgcc

SEQ ID NO: 89 - DNA, 203 bp, Artificial
  Synthetic oligonucleotide
tctgctggctgcgcggtggcggcggctgtgtgtgcgccgcgccttgccgccccccctggccccccgagcccggggcgcgcgctcccgcccgggccgtccgggccccgcggcgccgcggcccgaggccccgggaagcgcagccatggctctgcggaggctgggggccgcgctgctgctgctgccgctgctcgccgccgtggaag

SEQ ID NO: 90 - DNA, 229 bp, Artificial
  Synthetic oligonucleotide
agagacaggatctcactatgttgtccaggctggtcttgaactcgtggccacaaatgatcctcccacctcagcctcccaaagtgttggaattataggcatgaaccaccatgcccaggaggagaatttttgataataatattttgtggacatctttgcatatcatgtcagagctataacatcattgtggagaagctcttaggatcccatagaataaatgtaccgtaattta

SEQ ID NO: 91 - DNA, 336 bp, Artificial
  Synthetic oligonucleotide
ccatcccctccgcgccccaggctgtgatttccagtgtcaatgagacctccctcatgctggagtggacccctccccgcgactccggaggccgagaggacctcgtctacaacatcatctgcaagagctgtggctcgggccggggtgcctgcacccgctgcggggacaatgtacagtacgcaccacgccagctaggcctgaccgagccacgcatttacatcagtgacctgctggcccacacccagtacaccttcgagatccaggctgtgaacggcgttactgaccagagccccttctcgcctcagttcgcctctgtgaacatcaccaccaaccaggcag

SEQ ID NO: 92 - DNA, 125 bp, Artificial
  Synthetic oligonucleotide
ctccatcggcagtgtccatcatgcatcaggtgagccgcaccgtggacagcattaccctgtcgtggtcccagccagaccagcccaatggcgtgatcctggactatgagctgcagtactatgagaag

SEQ ID NO: 93 - DNA, 1305 bp, Artificial
  Synthetic oligonucleotide
gtacctattggctgggtgctgtccccatcacccacctccctgagggcccctctcccaggctgaggcctgggagttctgccccaccgcaagatgagacgcactggtgcagcagaaagagcactggccttggagtcaggctgcctggctcccaatccagctccgctccttcccactgtgagacctcaggcaggtgccttgacctctctggatctcacttttctggtctggaggatacacccagcaatctcagtgaaatgcaacagtcacatccctttccctaccacgaccctttcatcttgacctcagtggcttgatgttgggaaaaactgggtttccaaaaagctgcacttatgaagtgataattagtcactcacctcttcttcgacagagatttgaaacagctcaagagagcttccgcctgccctgctctgagtcctgctaaaacacccactttcactcgcctgcatgccctttgcatggggagaggtgatttcactttgagcttttaaatcagaccttaattactccctttgggtggaagcccctgggatggtagaaggatcactggactaagagtgagaagccgtaggttcaaatcccagctccgtccttcaccagctatgtgaccttgggcaggcgtctttctccctctgaacctcagtttccacctgtgtcgagtgtgggtgagacccctcgcggggagctatgcaggttacggagaaaaggcagcacagcacccagaatgggacctggccctcagcagaggccatgtgtgtccctggccttcctcctctgccctgcctgctgcacagtgggcaatggtgacaggatgggaggccaagtggatgtggggtctgcacagtacaggggccaggaggtagacagcacaattgcccacccacatggctggacatcagaggccccaggaagcctctcctttgaatgatcacttctcttacctgctccaggaggcaacaaacagccacagaggctgcaagggcacctgggaaaggcatcgcggggcttccattcagactaggtgtcaatgactgacagggaggcctttggttgagggcaagcccacggggaactgcagatggatggaagggctctccctgaaggctgagaggaagagtgcagtcaattgcagccagtcctgctggagcccaactttctagagcccagcccggccttcccactctgttaactgctggatcggctaaccaggccggtctccagggcctttcaaacacttacccagcctttgccggccgtcttaccattgcttgcgtgcgtgttcatccc

SEQ ID NO: 94 - DNA, 404 bp, Artificial
  Synthetic oligonucleotide
tgggaagaggtgagtggctacgatgagaacatgaacacgatccgcacgtaccaggtgtgcaacgtgtttgagtcaagccagaacaactggctacggaccaagtttatccggcgccgtggcgcccaccgcatccacgtggagatgaagttttcggtgcgtgactgcagcagcatccccagcgtgcctggctcctgcaaggagaccttcaacctctattactatgaggctgactttgactcggccaccaagaccttccccaactggatggagaatccatgggtgaaggtggataccattgcagccgacgagagcttctcccaggtggacctgggtggccgcgtcatgaaaatcaacaccgaggtgcggagcttcggacctgtgtcccgcagcggcttctacctggc

SEQ ID NO: 95 - DNA, 184 bp, Artificial
  Synthetic oligonucleotide
cttccaggactatggcggctgcatgtccctcatcgccgtgcgtgtcttctaccgcaagtgcccccgcatcatccagaatggcgccatcttccaggaaaccctgtcgggggctgagagcacatcgctggtggctgcccggggcagctgcatcgccaatgcggaagaggtggatgtacccatcaag

SEQ ID NO: 96 - DNA, 97 bp, Artificial
  Synthetic oligonucleotide
ctctactgtaacggggacggcgagtggctggtgcccatcgggcgctgcatgtgcaaagcaggcttcgaggccgttgagaatggcaccgtctgccgag

SEQ ID NO: 97 - DNA, 91 bp, Artificial
  Synthetic oligonucleotide
gttgtccatctgggactttcaaggccaaccaaggggatgaggcctgtacccactgtcccatcaacagccggaccacttctgaaggggccac

SEQ ID NO: 98 - DNA, 65 bp, Artificial
  Synthetic oligonucleotide
caactgtgtctgccgcaatggctactacagagcagacctggaccccctggacatgccctgcacaa

SEQ ID NO: 99 - DNA, 65 bp, Artificial
  Synthetic oligonucleotide
aaacgctaatggactccactacagcgactgctgagctgggctggatggtgcatcctccatcaggg

SEQ ID NO: 100 - DNA, 255 bp, Artificial
  Synthetic oligonucleotide
atggcccagatgtccccaccatttccccctcaaaggccaattaccgtccaggggaaaatctgaacctctcctgccacgcagcctctaacccacctgcacagtactcttggtttatcaatgggacgttccagcaatccacacaagagctctttatccccaacatcactgtgaataatagcggatcctatatgtgccaagcccataactcagccactggcctcaataggaccacagtcacgatgatcacagtctctg

SEQ ID NO: 101 - DNA, 1896 bp, Artificial
  Synthetic oligonucleotide
gtaagtggatccatgaagcactagcatcacattttcaggtggagtctggctctcagagaagagccaggaagaaattttctttcccaacctgtgtccaaggggcacacgcaaatcccaaattctcccctgaaccctcccaattcacctctgcagactcttttccccttgtttttttgttttttgttgttttttgttttttgatttctcatgtctgactttgggtccatcctggaatgagaggagggggctccctcagcactgagccctgtgtagtgaaaggggcttcacagagaaaaaaggaggaagggtcctcagggtcaagttcctgctctctgtcaccaacaattccctttctgtcacttctttgtgttcttttacctactccataagctacaagggacaaggaggttttgaaatgagctcacactttttccttaaatgagaagaggaagccccttgggtgatggaggagcagctcagactctgcccccatctctgctcccagcacccccagtgactgactgaccccaccctgaagccacctaaggtggaaccagggcatatggagaaggtgcccaggtgtctgtcctgaatcaggctaaatcaagatgctaatcaacaccaaagcctcccctggatcaggccgcaggaaaatgggaagacatggagcctcatgacagactgctgagctgtgtcctggctctgaagtcactggctgtataagactgtgggcacagcacatgggacacagcacagaggacagcaagtgacgcacacttggagacatagggagattcagccatggggactctgcatggcagggaaggggcagtgccaaaaagtgtgtatttatagagaggataagactaccagccactatgtatctaatataggacttaccttttcaacccttccacgtgtgcaggtccgtagtattaaacacattcccgttgttctgctaccatcaccaccacccacccacagaactctcttcttcctcccaaaatgaaactctgttcccatcaaactcctgggcagagctgcccacctgtgacccacagcctgacccctgaactcacctctagacttgcttctggtctcccgctcaaacccccatccccatcatcacccatctccaggatgtccttaaatagcaaagcctcagaaaaaacacaccttggctgggtggtgtgggactgtgcagctgaaagaaacagcacctgcatgttccaggtgagtaccccaaaagaccaggcagtcagccagtcagggaagaaacaggagaggtgccagaggctgtggctgtcagtcctgtatctgcccaagactcaatgcttctgccctattcacatttgagaaagtctgtacttctcccacacaaagcaggtggcctcgatctccgagccctcagatcgttgtgcatccgtcttctgacacacacacctgccctgggctcttaaggacttgggtggactgaggggtgggagatgccaactctgactgaacgatgcctgcagaggaatcaaaggtgccacacacggcaatcttctctctgttttctgcacagcggagctgcccaagccctcggtcaccagcaacaactccaaccctgtagagttttctacatataagtttaagttatctgtgaacagagataattttacttctttccgatttggatgtctgtttatttgtttgtttgctgcctaatttctccagctaggacttaaaatactatgttgaagagaagtggggcaagcaggcatccttgtcttgctcctggtcttacagggaaagctttcagtctttctccattgagtatccctctattatgttgaggtggtttccttccattcacagagtgtttttatttataaaagaatgttgaattttgtc

SEQ ID NO: 102 - DNA, 1410 bp, Artificial
  Synthetic oligonucleotide
attggaccagaccctgaattcttctagctcctccaatcccattttatcccatggaaccactaaaaacaaggtctgctctgctcctgaagccctatatgctggagatggacaactcaatgaaaatttaaagggaaaaccctcaggcctgaggtgtgtgccactcagagacttcacctaactagagacaggcaaactgcaaaccatggtgagaaattgacgacttcacactatggacagcttttcccaagatgtcaaaacaagactcctcatcatgataaggctcttacccccttttaatttgtccttgcttatgcctgcctctttcgcttggcaggatgatgctgtcattagtatttcacaagaagtagcttcagagggtaacttaacagagtatcagatctatcttgtcaatcccaacgttttacataaaataagagatcctttagtgcacccagtgactgacattagcagcatctttaacacagccgtgtgttcaaatgtacagtggtccttttcagagttggacttctagactcacctgttctcactccctgttttaattcaacccagccatgcaatgccaaataatagaattgctccctaccagctgaacagggaggagtctgtgcagtttctgacacttgttgttgaacatggctaaatacaatgggtatcgctgagactaagttgtagaaattaacaaatgtgctgcttggttaaaatggctacactcatctgactcattctttattctattttagttggtttgtatcttgcctaaggtgcgtagtccaactcttggtattaccctcctaatagtcatactagtagtcatactccctggtgtagtgtattctctaaaagctttaaatgtctgcatgcagccagccatcaaatagtgaatggtctctctttggctggaattacaaaactcagagaaatgtgtcatcaggagaacatcataacccatgaaggataaaagccccaaatggtggtaactgataatagcactaatgctttaagatttggtcacactctcacctaggtgagcgcattgagccagtggtgctaaatgctacatactccaactgaaatgttaaggaagaagatagatccaattaaaaaaaattaaaaccaatttaaaaaaaaaaagaacacaggagattccagtctacttgagttagcataatacagaagtcccctctactttaacttttacaaaaaagtaacctgaactaatctgatgttaaccaatgtatttatttctgtggttctgtttccttgttccaatttgacaaaacccactgttcttgtattgtattgcccagggggagctatcactgtacttgtagagtggtgctgctttaattcataaatcacaaataaaagccaattagctctataactaaa

SEQ ID NO: 103 - DNA, 214 bp, Artificial
  Synthetic oligonucleotide
tgaccctgggaaatgcttctatccctgagaggaggctcagcacagaaggaggaaggacagcagggccaacagtcacagcagccctgaccagagcattcctggagctcaagctcctctacaaagaggtggacagagaagacagcagagaccatgggacccccctcagcccctccctgcagattgcatgtcccctggaaggaggtcctgctcacag

SEQ ID NO: 104 - DNA, 360 bp, Artificial
  Synthetic oligonucleotide
cctcacttctaaccttctggaacccacccaccactgccaagctcactattgaatccacgccgttcaatgtcgcagaggggaaggaggttcttctactcgcccacaacctgccccagaatcgtattggttacagctggtacaaaggcgaaagagtggatggcaacagtctaattgtaggatatgtaataggaactcaacaagctaccccagggcccgcatacagtggtcgagagacaatataccccaatgcatccctgctgatccagaacgtcacccagaatgacacaggattctataccctacaagtcataaagtcagatcttgtgaatgaagaagcaaccggacagttccatgtatacc

SEQ ID NO: 105 - DNA, 836 bp, Artificial
  Synthetic oligonucleotide
gtgagtatttccacatgacctctgggtgttgggggtcagttctacttcccacatacgggattgtcaggcctgggttgtgcctgtggccctctctgcattacatcctgtatcagggtttggacatttagtgcaggacacacacgggggagacaaacttccacagatcagaattcctttcctggatccagaccctgcagacactcgctgcagaggaaggacagtctgatggggggactcagcagggcgaggtcagtgtcagacaagcaccccatggtctccccatggacctgaccctgagaaagaccctggagaactggatcagggcctggcctgaggggtccccctagggacccctcagagagaagctcaactcttccctgaactgagcccctgtacaaagccctgtccctggttcctgattccaggtgatcctggggagtctgtgccagggctgtgtggtggcctcttgggcagggctggctgggagcaaggatgtgagctatccaagggccatgactcctggagttggtcaccagccaggtccgagcacccagagcctcatctagctgaggatagggcctcctccttcacttgaggctcagcatggaaaggacagatggaaaaaattactagtgcatgagcccactgccctgggggacacaggttactccctgggaagttcagagtccccaaggggaggaacagagaagagaggatgctcctggcagctccatgtccaccagggatcaggcccagggccctctgtcttggaagcaaataatcatagataactgttcacttgggcagctcctctgtgcagagctgagatcaagtaa

SEQ ID NO: 106 - DNA, 279 bp, Artificial
  Synthetic oligonucleotide
cggagctgcccaagccctccatctccagcaacaactccaaccccgtggaggacaaggatgctgtggccttcacctgtgaacctgaggttcagaacacaacctacctgtggtgggtaaatggtcagagcctcccggtcagtcccaggctgcagctgtccaatggcaacatgaccctcactctactcagcgtcaaaaggaacgatgcaggatcctatgaatgtgaaatacagaacccagcgagtgccaaccgcagtgacccagtcaccctgaatgtcctct

SEQ ID NO: 107 - DNA, 113 bp, Artificial
  Synthetic oligonucleotide
tgctcctgtcctctcagctgtggccaccgtcggcatcacgattggagtgctggccagggtggctctgatatagcagccctggtgtattttcgatatttcaggaagactggcag

SEQ ID NO: 108 - DNA, 573 bp, Artificial
  Synthetic oligonucleotide
ttatgctcccgcggaggccaagcggactccctgacaggacagaatctgaacgtgagagtgaaggtcttgcctgtccagaaactcttgtagccagcacaggtttaaacaagaagccaaattgttctggagagattgctgggggctttctttgtgcctcaagcttcttcagtgccctgagcacaggaaacactcaagcagagaagcagagccaaacccaggatacgggaggtcgaggctcttccgtagacctgcagcattggggtgggatgatgttcattctgtgtgtgttctggaccaagcccctctccagggacctatgggcagccccctttaagcaagatgcccggtggagtgggcatccaccatcacttaccctgggcttgggtgaatagattttccgtgccttaaatgggcagggagggggtaaacatggacggtccattggtacaaataaaagcctttggtgggttttgatcaattgcaaggatcgaaggagacctgtggacctgaggtcaactggcagcagagaagagtctgggttcgtgaaggcgccgccgcggtgccgcgccacgt

SEQ ID NO: 109 - DNA, 387 bp, Artificial
  Synthetic oligonucleotide
gtaagccttccctcttgcttccccactccctgctgggctgagacgctcccaggagatcccgcccctgccacgcatcccagtgcatccctgcttggggtgccagtagcgggaagggcagaagttctgcctgacctggtctgtcatcacaacaagcctgtatcaaatttgaggcacccctcccacgccgcccaagtctcgcgcattctcctcccgagttgtaccagctatacttaagggcagtttaaaaataaaacaaacaaacaaaaacaacaaaactaaaaaaacgaagaactgaacggcggtttaaaaaaaaatagatacacgattattgttaaagatgctagcactggagctgcgcagagcgttggaagtggtgtttggtggagg

SEQ ID NO: 110 - DNA, 249 bp, Artificial
  Synthetic oligonucleotide
atttgcataaaaaaggccaagaaaactctggctgtgccccagcaacggctcattctgctcccccgggtcggagccccccggagctgcgcgcgggcttgcagcgcctcgcccgcgctgtcctcccggtgtcccgcttctccgcgccccagccgccggctgccagcttttcggggccccgagtcgcacccagcgaagagagcgggcccgggacaagctcgaactccggccgcctcgcccttccccggctcc

SEQ ID NO: 111 - DNA, 10 bp, Artificial
  Synthetic oligonucleotide
gtgctggagc

SEQ ID NO: 112 - DNA, 35 bp, Artificial
  Synthetic oligonucleotide
aggccggcgcttggatcccgctggtcatgaagcag

SEQ ID NO: 113 - DNA, 21 bp, Artificial
  Synthetic oligonucleotide
tgccacccggacaccaagaag

SEQ ID NO: 114 - DNA, 92 bp, Artificial
  Synthetic oligonucleotide
ttcctgtgctcgctcttcgcccccgtctgcctcgatgacctagacgagaccatccagccatgccactcgctctgcgtgcaggtgaaggaccg

SEQ ID NO: 115 - DNA, 60 bp, Artificial
  Synthetic oligonucleotide
ctgcgccccggtcatgtccgccttcggcttcccctggcccgacatgcttgagtgcgaccg

SEQ ID NO: 116 - DNA, 71 bp, Artificial
  Synthetic oligonucleotide
tttcccccaggacaacgacctttgcatccccctcgctagcagcgaccacctcctgccagccaccgaggaag

SEQ ID NO: 117 - DNA, 70 bp, Artificial
  Synthetic oligonucleotide
gctccctctgccccctcggggtcgcgcgcccacgatgctgcagggccctggctcgctgctgctgctcttc

SEQ ID NO: 118 - DNA, 11 bp, Artificial
  Synthetic oligonucleotide
ctcgcctcgca

SEQ ID NO: 119 - DNA, 24 bp, Artificial
  Synthetic oligonucleotide
ctgctgcctgggctcggcgcgcgg

SEQ ID NO: 120 - DNA, 7 bp, Artificial
  Synthetic oligonucleotide
gctcttc

SEQ ID NO: 121 - DNA, 80 bp, Artificial
  Synthetic oligonucleotide
ctctttggccagcccgacttctcctacaagcgcagcaattgcaagcccatcccggccaacctgcagctgtgccacggcat

SEQ ID NO: 122 - DNA, 55 bp, Artificial
  Synthetic oligonucleotide
cgaataccagaacatgcggctgcccaacctgctgggccacgagaccatgaaggag

SEQ ID NO: 123 - DNA, 248 bp, Artificial
  Synthetic oligonucleotide
gccccccaaagatggcggacaaggtggtcccacggcaggtggcccggctgggccgcactgtgcggctgcagtgcccagtggagggggacccgccgccgctgaccatgtggaccaaggatggccgcaccatccacagcggctggagccgcttccgcgtgctgccgcaggggctgaaggtgaagcaggtggagcgggaggatgccggcgtgtacgtgtgcaaggccaccaacggcttcggcagcctgagc

SEQ ID NO: 124 - DNA, 285 bp, Artificial
  Synthetic oligonucleotide
cacgaccgcgcttcacacagccctccaagatgaggcgccgggtgatcgcacggcccgtgggtagctccgtgcggctcaagtgcgtggccagcgggcaccctcggcccgacatcacgtggatgaaggacgaccaggccttgacgcgcccagaggccgctgagcccaggaagaagaagtggacactgagcctgaagaacctgcggccggaggacagcggcaaatacacctgccgcgtgtcgaaccgcgcgggcgccatcaacgccacctacaaggtggatgtgatcc

SEQ ID NO: 125 - DNA, 265 bp, Artificial
  Synthetic oligonucleotide
gtgcgcagcgacgtgaagccggtgatccagtggctgaagcgcgtggagtacggcgccgagggccgccacaactccaccatcgatgtgggcggccagaagtttgtggtgctgcccacgggtgacgtgtggtcgcggcccgacggctcctacctcaataagctgctcatcacccgtgcccgccaggacgatgcgggcatgtacatctgccttggcgccaacaccatgggctacagcttccgcagcgccttcctcaccgtgctgccag

SEQ ID NO: 126 - DNA, 240 bp, Artificial
  Synthetic oligonucleotide
gtgcgcggctgccacgccacgccacaccatgctggtgcccggacccgccccctgggcccggcgtcccacccaccgggtggggccccacccttccctcccgggccgtgctggccaggtcatctgccgagggagggcagcccaggggcaccgtctccacagcccctgggatgggtctggggtgctctcctggtctttgtgtcggcgttcccctccctacctcctttcctctcgctcttgcag

SEQ ID NO: 127 - DNA, 900 bp, Artificial
  Synthetic oligonucleotide
acccaaaaccgccagggccacctgtggcctcctcgtcctcggccactagcctgccgtggcccgtggtcatcggcatcccagccggcgctgtcttcatcctgggcaccctgctcctgtggctttgccaggcccagaagaagccgtgcacccccgcgcctgcccctcccctgcctgggcaccgcccgccggggacggcccgcgaccgcagcggagacaaggaccttccctcgttggccgccctcagcgctggccctggtgtggggctgtgtgaggagcatgggtctccggcagccccccagcacttactgggcccaggcccagttgctggccctaagttgtaccccaaactctacacagacatccacacacacacacacacacactctcacacacactcacacgtggagggcaaggtccaccagcacatccactatcagtgctagacggcaccgtatctgcagtgggcacgggggggccggccagacaggcagactgggaggatggaggacggagctgcagacgaaggcaggggacccatggcgaggaggaatggccagcaccccaggcagtctgtgtgtgaggcatagcccctggacacacacacacagacacacacactacctggatgcatgtatgcacacacatgcgcgcacacgtgctccctgaaggcacacgtacgcacacacgcacatgcacagatatgccgcctgggcacacagataagctgcccaaatgcacgcacacgcacagagacatgccagaacatacaaggacatgctgcctgaacatacacacgcacacccatgcgcagatgtgctgcctggacacacacacacacacggatatgctgtctggacgcacacacgtgcagatatggtatccggacacacacgtgcacag

SEQ ID NO: 128 - DNA, 471 bp, Artificial
  Synthetic oligonucleotide
gcagatatgctgcctggacacacacacagataatgctgcctcaacactcacacacgtgcagatattgcctggacacacacatgtgcacagatatgctgtctggacatgcacacacgtgcagatatgctgtccggatacacacgcacgcacacatgcagatatgctgcctgggcacacacttccggacacacatgcacacacaggtgcagatatgctgcctggacacacgcagactgacgtgcttttgggagggtgtgccgtgaagcctgcagtacgtgtgccgtgaggctcatagttgatgagggactttccctgctccaccgtcactcccccaactctgcccgcctctgtccccgcctcagtccccgcctccatccccgcctctgtcccctggccttggcggctatttttgccacctgccttgggtgcccaggagtcccctactgctgtgggctggggttgggggcacag

SEQ ID NO: 129 - DNA, 171 bp, Artificial
  Synthetic oligonucleotide
cagccccaagcctgagaggctggagcccatggctagtggctcatccccactgcattctccccctgacacagagaaggggccttggtatttatatttaagaaatgaagataatattaataatgatggaaggaagactgggttgcagggactgtggtctctcctggggcccgg

SEQ ID NO: 130 - DNA, 174 bp, Artificial
  Synthetic oligonucleotide
gacccgcctggtctttcagccatgctgatgaccacaccccgtccaggccagacaccaccccccaccccactgtcgtggtggccccagatctctgtaattttatgtagagtttgagctgaagccccgtatatttaatttattttgttaaacatgaaagtgcatcctttccctcca

SEQ ID NO: 131 - DNA, 55 bp, Artificial
  Synthetic oligonucleotide
gtccggacaggccgagatgacgccgagccccctgttgctgctcctgctgccgccg

SEQ ID NO: 132 - DNA, 40 bp, Artificial
  Synthetic oligonucleotide
ctgctgctgggggccttcccgccggccgccgccgcccgag

SEQ ID NO: 133 - DNA, 25 bp, Artificial
  Synthetic oligonucleotide
gtcaactacaccctcgtcgtgctgg

SEQ ID NO: 134 - DNA, 51 bp, Artificial
  Synthetic oligonucleotide
atgacattagcccagggaaggagagcctggggcccgacagctcctctgggg

SEQ ID NO: 135 - DNA, 30 bp, Artificial
  Synthetic oligonucleotide
gtcaagaggaccccgccagccagcagtggg

SEQ ID NO: 136 - DNA, 89 bp, Artificial
  Synthetic oligonucleotide
agcggacccgttccaagcccgtgctcacaggcacgcaccccgtgaacacgacggtggacttcggggggaccacgtccttccagtgcaag

SEQ ID NO: 137 - DNA, 78 bp, Artificial
  Synthetic oligonucleotide
atatgctgcctggacacacagataatgctgccttgacacacacatgcacggatattgcctggacacacacacacacac

SEQ ID NO: 138 - DNA, 90 bp, Artificial
  Synthetic oligonucleotide
gcgtgcacagatatgctgtctggacacgcacacacatgcagatatgctgcctggacacacacttccagacacacgtgcacaggcgcagat

SEQ ID NO: 139 - DNA, 46 bp, Artificial
  Synthetic oligonucleotide
atgctgcctggacacacgcagatatgctgtctagtcacacacacac

SEQ ID NO: 140 - DNA, 27 bp, Artificial
  Synthetic oligonucleotide
gcagacatgctgtccggacacacacac

SEQ ID NO: 141 - DNA, 29 bp, Artificial
  Synthetic oligonucleotide
gcatgcacagatatgctgtccggacacac

SEQ ID NO: 142 - DNA, 8 bp, Artificial
  Synthetic oligonucleotide
acacgcac

SEQ ID NO: 143 - DNA, 257 bp, Artificial
  Synthetic oligonucleotide
agtggggagagatgagtgtagataaaaggagtgcagaaggcacgaggaagccacagtgctccggatcctccaatcttcgctcctccaatctccgctcctccacccagttcaggaacccgcgaccgctcgcagcgctctcttgaccactatgagcctcctgtccagccgcgcggcccgtgtccccggtccttcgagctccttgtgcgcgctgttggtgctgctgctgctgctgacgcagccagggcccatcgccagcg

SEQ ID NO: 144 - DNA, 133 bp, Artificial
  Synthetic oligonucleotide
ctggtcctgccgctgctgtgttgagagagctgcgttgcgtttgtttacagaccacgcagggagttcatcccaaaatgatcagtaatctgcaagtgttcgccataggcccacagtgctccaaggtggaagtggt

SEQ ID NO: 145 - DNA, 1786 bp, Artificial
  Synthetic oligonucleotide
tggaaacaaggaaaactgattaagagaaatgagcacgcatggaaaagtttcccagtcttcagcagagaagttttctggaggtctctgaacccagggaagacaagaaggaaagattttgttgttgtttgtttatttgtttttccagtagttagctttcttcctggattcctcactttgaagagtgtgaggaaaacctatgtttgccgcttaagctttcagctcagctaatgaagtgtttagcatagtacctctgctatttgctgttattttatctgctatgctattgaagttttggcaattgactatagtgtgagccaggaatcactggctgttaatctttcaaagtgtcttgaattgtaggtgactattatatttccaagaaatattccttaagatattaactgagaaggctgtggatttaatgtggaaatgatgtttcataagaattctgttgatggaaatacactgttatcttcacttttataagaaataggaaatattttaatgtttcttggggaatatgttagagaatttccttactcttgattgtgggatactatttaattatttcactttagaaagctgagtgtttcacaccttatctatgtagaatatatttccttattcagaatttctaaaagtttaagttctatgagggctaatatcttatcttcctataattttagacattctttatctttttagtatggcaaactgccatcatttacttttaaactttgattttatatgctatttattaagtattttattaggagtaccataattctggtagctaaatatatattttagatagatgaagaagctagaaaacaggcaaattcctgactgctagtttatatagaaatgtattcttttagtttttaaagtaaaggcaaacttaacaatgacttgtactctgaaagttttggaaacgtattcaaacaatttgaatataaatttatcatttagttataaaaatatatagcgacatcctcgaggccctagcatttctccttggataggggaccagagagagcttggaatgttaaaaacaaaacaaaacaaaaaaaaacaaggagaagttgtccaagggatgtcaattttttatccctctgtatgggttagattttccaaaatcataatttgaagaaggccagcatttatggtagaatatataattatatataaggtggccacgctggggcaagttccctccccactcacagctttggcccctttcacagagtagaacctgggttagaggattgcagaagacgagcggcagcggggagggcagggaagatgcctgtcgggtttttagcacagttcatttcactgggattttgaagcatttctgtctgaatgtaaagcctgttctagtcctggtgggacacactggggttgggggtgggggaagatgcggtaatgaaaccggttagtcagtgttgtcttaatatccttgataatgctgtaaagtttatttttacaaatatttctgtttaagctatttcacctttgtttggaaatccttcccttttaaagagaaaatgtgacacttgtgaaaaggcttgtaggaaagctcctccctttttttctttaaacctttaaatgacaaacctaggtaattaatggttgtgaatttctatttttgctttgtttttaatgaacatttgtctttcagaataggattctgtgataatatttaaatggcaaaaacaaaacataattttgtgcaattaacaaagctactgcaagaaaaataaaacatttcttggtaaaaacgtat

SEQ ID NO: 146 - DNA, 153 bp, Artificial
  Synthetic oligonucleotide
atataatatatattatatatttagcattgctgagctttttagatgcctattgtgtatcttttaaaggttttgaccattttgttatgagtaattacatatatattacattcactatattaaaattgtacttttttactatgtgtctcattggtt

SEQ ID NO: 147 - DNA, 110 bp, Artificial
  Synthetic oligonucleotide
gtaagttctgtgctgctgtgtccgctgtgaccttggcaagagagaaatcccgcagcctgggtcttcaaccttggtatctcatgagtgtatcttctttttctttccttcag

SEQ ID NO: 148 - DNA, 84 bp, Artificial
  Synthetic oligonucleotide
agcctccctgaagaacgggaaggaaatttgtcttgatccagaagccccttttctaaagaaagtcatccagaaaattttggacgg

SEQ ID NO: 149 - DNA, 23 bp, Artificial
  Synthetic oligonucleotide
gtatttatatattatatatttat

SEQ ID NO: 150 - DNA, 817 bp, Artificial
  Synthetic oligonucleotide
gtgagttgtaatttccatatacacaggcgactggagccgttggtcagaaatactggcatctgccccctaaaaataaaatcagggaaccccaagagttagctgaaggactagaaattgtgattattattttcacaattaaagttgccattaaggttattaatctgctctggtgccagaggatatttcagtatttcagtgtcttccatttccaggcctaacccctgggagggtaaatgtgggtttctagaatactaagtaaatttgactaacaatgccaaaatgccccctgcctgttttgggacgtttacctcagtccctaatgggcttcagacctgaaaaatgcaatgtctggtttgggcactttgggcctgtaagccttcttggtgaagagcagaaactttgcagtaacaccttcagtgagttcaaggctaggatccctgtcaacattatttaatctctttgagctttagcaaaatagggtagataatggtagttatttcatagggttgtgtgcagcttaagggagatcatgaatggacatttctaacccaatgtgacaatcagtgaccaatatgttttggctttttcaaaccaagaatctagttgagtccacagccacttctttcttgaaaaaaaaaaaaaaaaagcattcaggagtgcaagttttctgctatagaaggcagtgggtacagacagaccttccctgagtggagggctgggagagagtctgcatggggacatccctccaagcaacttcagagtgacagaagagcagccttccttagcacctgcaacagtaacccttttctcatcacag

SEQ ID NO: 151 - DNA, 160 bp, Artificial
  Synthetic oligonucleotide
ggggagcaccaactgacaggagagaagtaagaagcttatcagcgtatcattgacacttcctgcagggtggtccctgcccttaccagagctgaaaatgaaaaagagaacagcagctttctagggacagctggaaaggacttaatgtgtttgactatttctt

SEQ ID NO: 152 - DNA, 176 bp, Artificial
  Synthetic oligonucleotide
ttatttatgtatttatttttgaaagcttgtattttaatattttacatgctgttatttaaagatgtgagtgtgtttcatcaaacatagctcagtcctgattatttaattggaatatgatgggttttaaatgtgtcattaaactaatatttagtgggagaccataatgtgtcagccac

SEQ ID NO: 153 - DNA, 336 bp, Artificial
  Synthetic oligonucleotide
agggtggggaactggagggtggggggattgaaatgcaagcaattagtggatcactgttagggtaagggaatgtatgtacacatctattttttatactttttttttaaaaaaagaatgtcagttgttatttattcaaattatctcacattatgtgttcaacatttttatgctgaagtttcccttagacattttatgtcttgcttgtagggcataatgccttgtttaatgtccattctgcagcgtttctctttcccttggaaaagagaatttatcattactgttacatttgtacaaatgacatgataataaaagttttatgaaaaaaaaggcttatgt

SEQ ID NO: 154 - DNA, 222 bp, Artificial
  Synthetic oligonucleotide
tcgccttccttcgggactccggatcgatctggagctccgggaatttccctggcccggccgctccgggctttccagtctcaaccatgcataaaaagggttcgccgatcttggggagccacacagcccgggtcgcaggcacctccccgccagctctcccgcttctcgcacagcttcccgacgcgtctgctgagccccatggcccacgccacgctctccgccgcc

SEQ ID NO: 155 - DNA, 20 bp, Artificial
  Synthetic oligonucleotide
gagcgtccgtggtcactgaa

SEQ ID NO: 156 - DNA, 63 bp, Artificial
  Synthetic oligonucleotide
ctgcgctgccagtgcttgcagacactgcagggaattcacctcaagaacatccaaagtgtgaat

SEQ ID NO: 157 - DNA, 21 bp, Artificial
  Synthetic oligonucleotide
gtaaggtcccccggaccccac

SEQ ID NO: 158 - DNA, 20 bp, Artificial
  Synthetic oligonucleotide
tgcgcccaaaccgaagtcat

SEQ ID NO: 159 - DNA, 32 bp, Artificial
  Synthetic oligonucleotide
gtaagtcccgccccgcgcttccgctgccaccg

SEQ ID NO: 160 - DNA, 48 bp, Artificial
  Synthetic oligonucleotide
ctggggtccccgactctcccgctgccccaaccctgtccccagcccgac

SEQ ID NO: 161 - DNA, 33 bp, Artificial
  Synthetic oligonucleotide
ctcctgtctcacggaattcccttctctctgcag

SEQ ID NO: 162 - DNA, 84 bp, Artificial
  Synthetic oligonucleotide
agccacactcaagaatgggaagaaagcttgtctcaaccccgcatcccccatggttcagaaaatcatcgaaaagatactgaacaa

SEQ ID NO: 163 - DNA, 13 bp, Artificial
  Synthetic oligonucleotide
acgagggttctac

SEQ ID NO: 164 - DNA, 13 bp, Artificial
  Synthetic oligonucleotide
cttgataaatgac

SEQ ID NO: 165 - DNA, 48 bp, Artificial
  Synthetic oligonucleotide
cccagcaatccccggctcctgcgggtggcgctgctgctcctgctcctg

SEQ ID NO: 166 - DNA, 25 bp, Artificial
  Synthetic oligonucleotide
gtggccgccagccggcgcgcagcag

SEQ ID NO: 167 - DNA, 98 bp, Artificial
  Synthetic oligonucleotide
gtgggtcccggcgccctggggtccccgggccggacgcggctggggtgggcgccccgcgccgacagccccgctcaatcagcgagtctattcttccctag

SEQ ID NO: 168 - DNA, 139 bp, Artificial
  Synthetic oligonucleotide
gtgcgtctccatggcgacccgccggtgctataagtagggagcggcgtgccgtggggctttgtcagtccctcctgtagccgccgccgccgccgcccgccgcccctctgccagcagctccggcgccacctcgggccggcgt

SEQ ID NO: 169 - DNA, 135 bp, Artificial
  Synthetic oligonucleotide
gttggttttgcggattgccactgatgattccaaagcagtctgtcgtctcagtgtgaaattcggtgccacgctcagaaccagcaggctccttttggaacgggcgaaagagctaaatatcgatgttgttggtgtcag

SEQ ID NO: 170 - DNA, 163 bp, Artificial
  Synthetic oligonucleotide
atcaccggcgtaatcaacccagcgttggacaaatactttccgtcagactctggagtgagaatcatagctgagcccggcagatactatgttgcatcagctttcacgcttgcagttaatatcattgccaagaaaattgtattaaaggaacagacgggctctgatg

SEQ ID NO: 171 - DNA, 215 bp, Artificial
  Synthetic oligonucleotide
agacctaaaccagatgagaagtattattcatccagcatatggggaccaacatgtgatggcctcgatcggattgttgagcgctgtgacctgcctgaaatgcatgtgggtgattggatgctctttgaaaacatgggcgcttacactgttgctgctgcctctacgttcaatggcttccagaggccgacgatctactatgtgatgtcagggcctgcgtg

SEQ ID NO: 172 - DNA, 173 bp, Artificial
  Synthetic oligonucleotide
gatgccagcaccctgcctgtgtcttgtgcctgggagagtgggatgaaacgccacagagcagcctgtgcttcggctagtattaatgtgtagatagcactctggtagctgttaactgcaagtttagcttgaattaagggatttggggggaccatgtaacttaattactgctagtt

SEQ ID NO: 173 - DNA, 1096 bp, Artificial
  Synthetic oligonucleotide
ttgaatatttgttttatatggatttttattcactcttcagacacgctactcaagagtgcccctcagctgctgaacaagcatttgtagcttgtacaatggcagaatgggccaaaagcttagtgttgtgacctgtttttaaaataaagtatcttgaaataattaggcattgggacgtttttatggtgtgttcattccagacagttcacgaatcccgtatagctcgctctgattctcagagaacaatgagtgggtccacccacacacaggtaggaggacaggtgagacggaagccccatcctcccatgtggacggtgcacatctgctcagcccaccccacatgtccagagttggctgcaaactccttgtccagagcctctggtggtgggacctacttaagtctgacggacctgtcctgtccaggccagtgcccagggaaggtgtgggaggccctttgagcctggcctgcagagaccatccgtgtcccctcccaccttcatgcctgtgagaagttaggaatgtatacggtaccacatttggcagtcagcttattttaataaattcagcaacagcaagtccctaccatgttgtgtatcttcaccatcttgtctgaccatgaccactggccttgtgtgttcttttactcaacgtgtacccccgctctcccccaaagtgtggcaggctctcatgctccttaacccccattgtggcaatgtcttacgggtaacgctggagctgcaggaggagggaaggacacgtcagagccaccaggcagtgggagcatcttggagtccccaccagcctcatgagggggacaggaagagagcaaatgtgtagggaggaaggctgtggctcctcccggggtgggaaggtcaagccgatgctgtcacccatttaccaaagctgaagagagtgacttcctttctcaaaagcatcaccttcccctgaaccctgagtccagagaagccaggagccctcatgtggctgccgagttagctcagggcttggcttatcaccaactctggtctccctgggccagggttgccaaaacatgaaagattttttcaggagccagaggttggttctgactggaggggga

SEQ ID NO: 174 - DNA, 117 bp, Artificial
  Synthetic oligonucleotide
gacgtcggcccgccggcgccccaccagctccgcgcgggcccgggttggccaccgccgggcccccgcccctcccccggcggtgtcccggccggaaccgatcgtggctggtttgagctg

SEQ ID NO: 175 - DNA, 110 bp, Artificial
  Synthetic oligonucleotide
attgtcactgctgttccaagggcacacgcagagggatttggaattcctggagagttgcctttgtgagaagctggaaatatttctttcaattccatctcttagttttccat

SEQ ID NO: 176 - DNA, 92 bp, Artificial
  Synthetic oligonucleotide
aggaacatcaagaaatcatgaacaactttggtaatgaagagtttgactgccacttcctcgatgaaggttttactgccaaggacattctggac

SEQ ID NO: 177 - DNA, 27 bp, Artificial
  Synthetic oligonucleotide
cagaaaattaatgaagtttcttcttct

SEQ ID NO: 178 - DNA, 72 bp, Artificial
  Synthetic oligonucleotide
ctccggcgggcgggagccaggcgctgacgggcgcggcgggggcggccgagcgctcctgcggctgcgactcag

SEQ ID NO: 179 - DNA, 82 bp, Artificial
  Synthetic oligonucleotide
cttccatgtaggaagcggctgtaccgatcctgagaccttcgtgcaggcaatctctgatgcccgctgtgtttttgacatgggg

SEQ ID NO: 180 - DNA, 56 bp, Artificial
  Synthetic oligonucleotide
gctccggcgtctgcgcttccccatggggctggcctgcggcgcctgggcgctctgag

SEQ ID NO: 181 - DNA, 84 bp, Artificial
  Synthetic oligonucleotide
gctgaggttggtttcagcatgtatctgcttgatattggcggtggctttcctggatctgaggatgtgaaacttaaatttgaagag

SEQ ID NO: 182 - DNA, 113 bp, Artificial
  Synthetic oligonucleotide
acgaagatgagtcgagtgagcagacctttatgtattatgtgaatgatggcgtctatggatcatttaattgcatactctatgaccacgcacatgtaaagccccttctgcaaaag

SEQ ID NO: 183 - DNA, 55 bp, Artificial
  Synthetic oligonucleotide
gcaactcatgcagcaattccagaaccccgacttcccacccgaagtagaggaacag

SEQ ID NO: 184 - DNA, 94 bp, Artificial
  Synthetic oligonucleotide
ttgaaatgtctttgtaagagtagggtcgccatgatgcagccatatggaagactaggatatgggtcacacttatctgtgttcctatggaaactat

SEQ ID NO: 185 - DNA, 271 bp, Artificial
  Synthetic oligonucleotide
gcggccgcagagcactttgcccggagcccagcgtcctcccctgagttcgctgagtctcccgggaccagcaaaggctgcgcgccccgcatcggcccggaggcggggagccctgggaggcctggccgagctgcccgcagggaaatggcggagaaagcgcttctctgcccgagttcagccgggctggggacttggccctgggtcctgaactcggcatggccagttctgcctctggctgtggaccagggtgtggactggagaccgcgggggccag

SEQ ID NO: 186 - DNA, 172 bp, Artificial
  Synthetic oligonucleotide
gggatcgacattgagaccaagatgcacgtccgcttccttaacatggaaaccatggccctctgccactgacccaccgccacctccgcggagaaactgcactttgcaatggggccgcctccccgcgtagctggagcagcccaggcccggcggacagcctcttcctgcagcgccg

SEQ ID NO: 187 - DNA, 77 bp, Artificial
  Synthetic oligonucleotide
gagaacttcaacaatgtcccggacctggagctcaaccccatccgatccaaaattgttcgtgccttcttcgacaacag

SEQ ID NO: 188 - DNA, 115 bp, Artificial
  Synthetic oligonucleotide
gaacctgcgcaagggacccagtggcctggctgatgagatcaatttcgaggacttcctgaccatcatgtcctacttccggcccatcgacaccaccatggacgaggaacaggtggag

SEQ ID NO: 189 - DNA, 25 bp, Artificial
  Synthetic oligonucleotide
ctgtcccggaaggagaagctgagat

SEQ ID NO: 190 - DNA, 62 bp, Artificial
  Synthetic oligonucleotide
ttctgttccacatgtacgactcggacagcgacggccgcatcactctggaagaatatcgaaat

SEQ ID NO: 191 - DNA, 108 bp, Artificial
  Synthetic oligonucleotide
gtggtcgaggagctgctgtcgggaaaccctcacatcgagaaggagtccgctcgctccatcgccgacggggccatgatggaggcggccagcgtgtgcatggggcagatg

SEQ ID NO: 192 - DNA, 48 bp, Artificial
  Synthetic oligonucleotide
gagcctgatcaggtgtacgaggggatcaccttcgaggacttcctgaag

SEQ ID NO: 193 - DNA, 9 bp, Artificial
  Synthetic oligonucleotide
atctggcag

SEQ ID NO: 194 - DNA, 108 bp, Artificial
  Synthetic oligonucleotide
gtacatagccaaggctcgtctgcgcaccttgtgtcttgtagggtatggtatgtgggacttcgctgtttttatctccaataaaaaaaaaaaaaaggtttgttaattaat

SEQ ID NO: 195 - DNA, 70 bp, Artificial
  Synthetic oligonucleotide
tctcatcggatcagatcgagcagctccatcggagatttaagcagctgagtggagatcagcctaccattcg

SEQ ID NO: 196 - DNA, 4 bp, Artificial
  Synthetic oligonucleotide
caag

SEQ ID NO: 197 - DNA, 120 bp, Artificial
  Synthetic oligonucleotide
ctgtgcagtggctgtgaacagccactgggctcccgttcttttgtgcccgacaagggtgctcactactgcgtgccctgctatgagaacaagtttgctcctcgctgcgcccgctgcagcaag

SEQ ID NO: 198 - DNA, 131 bp, Artificial
  Synthetic oligonucleotide
acgctgacacagggtggagtgacataccgtgatcagccgtggcatcgagaatgtctggtctgtaccggatgccagacgcccctggcagggcagcagttcacctcccgggatgaagatccctactgtgtggc

SEQ ID NO: 199 - DNA, 217 bp, Artificial
  Synthetic oligonucleotide
gggaggagggggccgggccgactggcggccgaaagggaggtgggggcggggtctggcccccgcggcgggctggggggccggggtgcggggtccgggcggggcgggcccgcgctcacttcctcggggaggggttggggccgcgctcccactcgcccacacggtccgtctgcagtcggcagcctcgccggcagctcgctcggcccccgcttggcccggc

SEQ ID NO: 200 - DNA, 245 bp, Artificial
  Synthetic oligonucleotide
gactcggtggaggcaagtatgtgtcctttgaagaccgacactggcaccacaactgcttctcctgcgcccgctgctctacctccctggtgggccagggcttcgtaccggatggagaccaagtgctctgccagggctgtagccaggcagggccctaagccagggctcctggacccaggctttcccataccacgggcccaggactgtggctccttttctaaaccacctctgggactcagctccccccg

SEQ ID NO: 201 - DNA, 404 bp, Artificial
  Synthetic oligonucleotide
ccaaaaaaaatgggtctccttctgggctccaggattgtctccccactccagcatccccaaactggtactccctgacccaggcccccaatcctgggctcttacagagcctccatgagtcaagccccctccccacacctggactccagaattcaccctctcccctgcagtctgggttcccagactgagtcctctccccaaatcagggctctagacccgagccctccaaacctggactctgggacttaggcccccttaaatctagacttctctttataggtttcaggtctcctatgggtgcctgggaagtccttgaaagtggactgttctcaggcttgacctgccccaccccatccccgcggttgaggctgtgggggcagcagatcaggagcccactgataaggggc

SEQ ID NO: 202 - DNA, 150 bp, Artificial
  Synthetic oligonucleotide
cctagggtacagggtgctgcccagcaggtcgccaccgagtgtcttctcattttatttcagctccattttgcccatagatgggcagaggggtgagattggctcatcccccttccagattctgcaataaagcggtgtgaggaagcaggggcc

SEQ ID NO: 203 - DNA, 49 bp, Artificial
  Synthetic oligonucleotide
ctgccagcgctcactagccgatgaacccttcacctgccaggacagtgag

SEQ ID NO: 204 - DNA, 73 bp, Artificial
  Synthetic oligonucleotide
ctgctctgcaatgactgctactgcagtgcgttttcctcgcagtgctccgcttgtggggagactgtcatgcctg

SEQ ID NO: 205 - DNA, 50 bp, Artificial
  Synthetic oligonucleotide
ggtcccggaagctggaatatggaggccagacatggcatgagcactgcttc

SEQ ID NO: 206 - DNA, 52 bp, Artificial
  Synthetic oligonucleotide
ctgttttggagaactctttgcacctaagtgcagcagctgcaagcgccccatc

SEQ ID NO: 207 - DNA, 4 bp, Artificial
  Synthetic oligonucleotide
gtag

SEQ ID NO: 208 - DNA, 6 bp, Artificial
  Synthetic oligonucleotide
ccgcag

SEQ ID NO: 209 - DNA, 43 bp, Artificial
  Synthetic oligonucleotide
gtaggagccgccgagggacgcggcgcccggttcccggccccgc

SEQ ID NO: 210 - DNA, 39 bp, Artificial
  Synthetic oligonucleotide
ctgcgccgcgcgctccccgctcccgccgcccgcttcgag

SEQ ID NO: 211 - DNA, 53 bp, Artificial
  Synthetic oligonucleotide
gagctgttctatgaagaccgccatttccacgagggctgcttccgctgctgccg

SEQ ID NO: 212 - DNA, 997 bp, Artificial
  Synthetic oligonucleotide
tctgcaggaggggagctgggaacgacctgagctaaagctcggagctgtgcgaagaaaccggaaaagcccagagcacttgcaggggcgggtggggagctagatggtggggtggggtggggacggaggagggccagcaggagacattccgcagggaggggcaagcacgtgtgaggcgggcggggcgcgaagggtcaggcttttgctcaaaacaggcagaggacaaggtcagctcagccgcagaccgagccgctggtgactgtctccgccaccaggcagtgagagtgaagggagagcgcgagctctgaagcccgctagactaagcttgcaatctgagctccattcaccccctcctatttcttgagaccttgtcagttcccctgtgagcctcggactcctcacttgtaaaacgaggacagatgcccgtgccagaagtcaaccagagctttccccggcgtgggcaccagcccaagggcgttttgcttttctagtctcatctctgctctgacgctaagctcaaagagggactgggggacgggaagatatccaccatggcatgcgccctagctctcgggctggtgttggctgcttccttctcagattccagagtgcctagaggccaggaaagggagaaggtcctaccagcctggggtagggactcgggggccaggcactggcgctgacgcaggctagcagggcgccactggctggtccccacccacctcggtgggttgggggatgggcgcaccagcccctcctgggtgagccctagcctggggcttcctatttcgggagccgggggcgtgggccacgtctcctcatgtgatgcgagggctatttaaagcggcagcccgggcagggagccgccgtcggagcccttgcacgcctgctctcttgtagcttctctcagcctagcccagcatcactatggtggacgctttcctgggcacctggaagctagtggacagcaagaatttcgatgactacatgaagtcactcg

SEQ ID NO: 213 - DNA, 838 bp, Artificial
  Synthetic oligonucleotide
gtaagatgggcaactttggagctatatctgattggttattactactgctctttcagccaagcctgttctaaaaagccaagtcctcccctgagagctgtagaagctgggacaagagagtggttgtgggtcagggtggtatcaggtgggaattttctgtgtagtggctttggactcacacaggccggaactcaaatcttaccttataggctacatgactgtgggcaaatcaccttttccaagtgcaactgtaaaacgggtattaataataccaaccttgtagggctgctgggaagcctgtaagagacagtgtatgcacagcacaaagcatcactgattgaggaacacagcaggtgctccatgtcctttgtttgctcttcctgtgtttctaccttgcctcacctcaggaagaagtagaaaacagggccaaatctgatcccaggccctctaggaggggctcccattgcctatctcagcattccctttcctctcctccctaggactgcattgtcacttgcagggacaggctcgtgactggtggggacactgaatgacagtacagtcctttcttccccattctagtcctaccccattttcatgctttctatgtctggcctactgaaactacttgactactgcttgggtaggaagtaccacagccaggctggcagatctgttcaagcttggggacttcacttggagaatctagccttgactgaattccccccagacccagggagagcagccaactgtggattctgcctaaccacagggcctcaggttttcacctaggcatcttcactgcacaccttcttgggtcagcataacctgttaactgcat

SEQ ID NO: 214 - DNA, 2226 bp, Artificial
  Synthetic oligonucleotide
acactcacccacggcactgcagtttgcactcgcacttatgagaaagaggcatgacctgactgcactgttgctgactactactctgccaatcggctacccctcgactcagcaccacattgcctcatttcttcctctgcattttgtacaaatccacgaattcttctggggtcaggtgccactgaccgggatccagttccagttcccatggtgtatgtggttttttttttttttttttaactgcactcatagggtgctctgaggtcaataaagcagagccaaggccacccagttgcctttttgcctttggtaacataactctgggagtcttggtttatcctgtgtgtcagagagtgggcagaaataacggcctgaaggttactgaggaagaagcactggatgggagactgaaatggacagtctcggagcctgttaatcagctgatcaccttacacatttaataataaaagagctgtacctacacgttgcctttacactgccccccctccatggtcaaatgacctagttcagtcagtgatggggcttccccaggtttggctattgaactgtcacttcaggcccatcctacactgaaagctcttgggtctggctgttctctgtgaaatgctgtagtctctccctttccagaattcaggttcagggcacagaacccaggcttgtaccatggtggtgggagaaaatgaccactggccaagaggactgctgacctgtgcaccaggctagtacttatgactacaaattcttactgcttctctaatcaactctgagggaagagggcatctgatcattacaaaagggagggcttataagtgatctcccaagaaggcagtgatctgctagtgcctttggctctgtacctctgctgggcatctctccaaggtctaaggtaacatattaaatgtttttgtcagctaatgcaggctcagtgactttaagtctgtaagttacccaggaagaaggattataggaaaaataactcagtaagtttaaaaccaaacacatttccatttagtgacaggaatttaagcaaggacctgaagtagaatcaactgattcacacagtagtaaatacaaagtagaacaatgatcttggcttcgctgtctggttcagtggtctgctggaatgcaatacacaagttaagtcacactgcagactgttttctagctgtggccgctggatgccacttctagcatagtagaactatgttaggaggaatgggaaaagtgagcaccacttctcaccatgttcccccctcctgctgccagtctctgctcccatgttggatgcagcagagatcacccaccagttggcccaggacagaccaataggaagggtccaatcactctaactacagccgaactcacctccacaacagtctctgtggctctagcctggactcctttacaggaatccagctctggcagtggcagctggagagggtaatagggcctcctgctgaatgaaggaagttgggtgaatgaatgggtgagctgcagggttcacttgcaaagggaccaggagtgataaggaaacaacaactcattcaggcagctgcttttgacctctaactcccaaacctgcctgttgcatgaggggaagccatctcccatgggagcgaagttaatggggtgggaggctatattctcactattgagtctttccaggagtctcaaggcacaaggctcctggtttcttactctcaaccaccccctacactctttatactctcactccttgtgcttcttcttgtgcttcttcttctttttcttcttctttgctgccttgctgtcttttgatgtgtgccttgccctcttgcctgtatcactctcagagtctgagctgtcagagtcagatgacttcctatctctatgtttctttttcttcttctcctgaaaagaaaattttaaaaatcaacactgtatgtgtatatttgcttttaacaatcatagcacataattggccaggtgcagtggctcacacctgtaatcctagtactttgggaagccgaggtgggaggaatgcttgaggccaggagttcaagatcaacctggctaacatagcaagatctcatctctaaaaagagaaaaaaagaaaaattatagcacacaatcaataggggaccacttaattttcttttagacagtctcgctctgttgcccaggctagagtgcagtgcagtggcacgatcacagctcactgcaacctca

SEQ ID NO: 215 - DNA, 461 bp, Artificial
  Synthetic oligonucleotide
gatgttctgacagcctggccaagcatctacaggagacaagtcaaagttttaagagaagatgaaataacaattcttccttggcatctccaatggagtagagagaaggcaacaaagcttctcagacccacattaccgagctataacaaccatggctgggaggagctgagagttggcaaatcaatagtttagctatgttgctgaaccttcctggatggcaagaccatggaagtccatcacaagatattatggggtcaggagcctcactgggttctgccccttatataggtgaatatcctgggaaagtaaaaatgaaaatacagagtctggcaccagttccctgcaagcctggtccagcctggataaagaagtgaggagagtaataatactgccttacacctaaacagtgctttagtttatcaagctttttgcatccttatcttacaataatagtctgtagagtc

SEQ ID NO: 216 - DNA, 550 bp, Artificial
  Synthetic oligonucleotide
atggaaaaactgcaactcagaaatgtaaagtgagtcgaccaaggctaaagcggcaaaaccactatactttataacacagagtttggcactatttccactttgttctctctcaaagatgaaggctcaggaggagggaagataaaaacaaatcactggagagtcctggcatgctggaacatggactctagctagcaagaagggctcaaggaggtggccttctcctagacctcaactttgatgcaaaagctgttttgcagcctgaacaaagacaatccaatcctccagcaaatggcgtcattttccctacgtgtctagccttgagctacagaacaaaagaacaatcacatccgaagttgtagttcgcctggttgcggtggctcacgcctgtgatcccagcactttgggaggccaaggtgggtggatcacctgaggtcaggaggtcgagactagcctgaccaacatgaagaaaccccatctctactaaaaatacaaaattagctgggcgtggtggcacatgcctgtaatcccagctactcgggaggctgaggca

SEQ ID NO: 217 - DNA, 173 bp, Artificial
  Synthetic oligonucleotide
gtgtgggttttgctaccaggcaggtggccagcatgaccaagcctaccacaatcatcgaaaagaatggggacattctcaccctaaaaacacacagcaccttcaagaacacagagatcagctttaagttgggggtggagttcgatgagacaacagcagatgacaggaaggtcaag

SEQ ID NO: 218 - DNA, 102 bp, Artificial
  Synthetic oligonucleotide
tccattgtgacactggatggagggaaacttgttcacctgcagaaatgggacgggcaagagaccacacttgtgcgggagctaattgatggaaaactcatcctg

SEQ ID NO: 219 - DNA, 33 bp, Artificial
  Synthetic oligonucleotide
ctcatatactcataaccttccccctaccctcag

SEQ ID NO: 220 - DNA, 669 bp, Artificial
  Synthetic oligonucleotide
cctggaccctggggcgtgaggagggcgcggtgcgtcccgtggttgtgcttggaagccccccgagggtgcgcgcgcgtgggtatgagtgcgtgcgtgtgcctgggtgtgcgtgtgtgtaagtgtgcacgtgtgtgtgtgagagtgcgcgcggggaaggaggcacagagacagcccggacaggccactgcgcagccctggtggcccccgctccacctctcgctccgcagacccgcgccagggaggcctctgggccgcagcgggcaccggagcggagcgggcgcggcagcgggcgctgggaggtggggctgggggaggagagggggagggagagaggcgggcgggaggggaggatccgggaagctccggggtatttgacaggagcgagggcggacgcaaagaacgcggaggacctctgggtgcctgcaggggagctgctccagccgggccgccgggagcggtggggagagcatcgcggagccgcccctccacgcgcccgcccagccgcgctcgcccactgggctctcccggctgcagtgccagggcgcaggacgcggccgatctcccgctcccgccacctccgccaccatgctgctcccccagctctgctggctgccgctgctcgctgggctgctcccgccggtgcccgctcagaagttctcggcgctcacg

SEQ ID NO: 221 - DNA, 187 bp, Artificial
  Synthetic oligonucleotide
tgtcatcctgtgaccaagagcaccagtctgccctggaggaagccaagcagcccaagaacgacaatgtggtgatccctgagtgtgcgcacggcggcctctacaagccagtgcagtgccacccctccacggggtactgctggtgcgtcctggtggacacggggcgccccattcccggcacatccacaag

SEQ ID NO: 222 - DNA, 172 bp, Artificial
  Synthetic oligonucleotide
tttttgagagtggatcaagataaagacaaggattgtagcttggactgtgcgggttcgccccagaaacctctctgcgcatctgacggaaggaccttcctttcccgttgtgaatttcaacgtgccaagtgcaaagatccccagctagagattgcatatcgaggaaactgcaaag

SEQ ID NO: 223 - DNA, 275 bp, Artificial
  Synthetic oligonucleotide
gctctcagaacccgaccccagccataccctagaggagcgggtggtgcactggtacttcaaactactggataaaaactccagtggagacatcggcaaaaaggaaatcaaacccttcaagaggttccttcgcaaaaaatcaaagcccaaaaaatgtgtgaagaagtttgttgaatactgtgacgtgaataatgacaaatccatctccgtacaagaactgatgggctgcctgggcgtggcgaaagaggacggcaaagcggacaccaagaaacgccaca

SEQ ID NO: 224 - DNA, 1685 bp, Artificial
  Synthetic oligonucleotide
gatgcaatggtggtgtcctccagacccaaagccacaacccatcgcaagtcaagaacactttccagaagataaacatgagtgggttcatgtctctctccttcaaagccaggacaaaatccccacttctttgctgccgcgagtcaatttgtgatttattttgtctgcacctgtttgatgccaggtcgacatttcctaaggcaagcccctgtatttgttgtggatttaagtggaggcggccagcacacaccttggatgtaatttaaaaccatttcctgaggaaagatgtgtgatatgctttcctttgtttagcaaatgtttatggttttaactttaaatctcaccgcaaatcacttacacttgaaaacagggctggtctgaaagtaattaccctccctgagtgccaagacctccagaagttgttttcattcccgaatggcaatcactgtactcatgcgctccacgcatcttaaataaactcagttcaaagcacatgcctcctgcttcagctcttttttccaaaaagagaaacagaagcaggttccccctccttttatagtgcctgcgtggacacgcggacctccatgcctttcatgctgtggctatgtcagcaaactacgatattgggatgatcctaacgggcaagccagctgcggctcctaccggccgtggccattgaaggccaccatgttgctttgaaacatctcaaagaataacatagtgccagccagcaagggtttcaccatatgcatgacccagacaggaactatcaaaagaagggatcacgggaaggtgcatgatgctaatgtggaatccagaggagctctttcctgatctcttcagcttccgctgccactccagaatcatcagagctgatattaaataagttaaaatgttagtccaccgtctcctcctgcaatcctaaccatcttttgagactgttagaatactttgacgggttgtctttctgtgcaactaatttaaacctcaagtttagtgtaggagatgggtttgtcttctcacctcttcagatctttatcaagggggaataaaagccaacccagaaacctaaactttaaaatttaattatttgaaataataaaacagaagaagggatcaacatttgtcggaattggcactcttggaaaactaagtctaggagatcatatattgctttttttttttcattctaaattacttttaattgaaagtcaagatgctgagttacagttgtttatcattataataagcaaactttttaagttggatttcttcttaaagaggtaaactagtgaacaaaaaagataaaaaggaaaattaagaatcaactatgcctttatcaaatttgaagcataagttatattattaaaattatttttgtataatcaaggtgataagacattctggaaaacatttaatgtatttagtacttagaatatttacagtggatgttacttttttgaaacgatatatttttcccaatttttctatcatgtcaaggaaggaaactgttaagaagttaccagtgtccaaaatgtcttcattgtttcttactcatacttacacctcacatgacctgcccagccctctttggttcagttcattcccagaagccaagccttagtcttcacagatgagcgacacacacctctgaatataatgtctcttttttgttttttccttttcag

SEQ ID NO: 225 - DNA, 877 bp, Artificial
  Synthetic oligonucleotide
ccaaggaaacaaggataaatggctcataccccgaaggcagttcctagacacatgggaaatttccctcaccaaagagcaattaagaaaacaaaaacagaaacacatagtatttgcactttgtactttaaatgtaaattcactttgtagaaatgagctatttaaacagactgttttaatctgtgaaaatggagagctggcttcagaaaattaatcacatacaatgtatgtgtcctcttttgaccttggaaatctgtatgtggtggagaagtatttgaatgcatttaggcttaatttcttcgccttccatatgttaacagtagagctctatgcactccggctgcaatcgtatggctttctctaacccctgcagtcacttccagatgcctgtgcttacagcattgtggaatcatgttggaagctccacatgtccatggaagtttgtgatgtacggccgaccctacaggcagttaacatgcatgggctggtttgtttcttgggattttctgttagtttgtcttgttttgctttccagagatcttgctcatacaatgaatcacgcaaccactaaagctatccagttaagtgcaggtagttcccctggaggaaataatattttcaaactgtcgttggtgtgatactttggctcaaaggatctttgcttttccattttaagcttctgttttgagttttgccctggggcttgaatgagtcccagagagtcgttcggatggtgggaggctgcctaggaggcagtaaatccagtcacagtgcctgggaggggcccatccttccaaaatgtaaatccagtcgcggtgtgaccgagctggctaacaggcttgtctgcctggttttcctcctacacgtggacattattctc

SEQ ID NO: 226 - DNA, 252 bp, Artificial
  Synthetic oligonucleotide
gatacgtggtgcccccggggctggtgttggcagccggggggaggtgcctgagggtccccacggttcctttctgcttttctgaatgcatcaagggtacgagaacttgccaatgggaaattcatccgagtggcactggcagagaaggataggagtggaatgcccacacagtgaccaacagaactggtctgcgtgcataaccagctgccaccctcaggcctgggccccagagctcagggcacccagtgtcttaag

SEQ ID NO: 227 - DNA, 349 bp, Artificial
  Synthetic oligonucleotide
gaaccatttggaggacagtctgagagcaggaacttcaagctgtgattctatctcggctcagacttttggttggaaaaagatcttcatggccccaaatcccctgagacatgccttgtagaatgattttgtgatgttgtgatgcttgtggagcatcgcgtaaggcttcttgcttatttaaactgtgcaaggtaaaaatcaagcctttggagccacagaaccagctcaagtacatgccaatgttgtttaagaaacagttatgatcctaaactttttggataatcttttatatttctgacctttgaatttaatcattgttcttagattaaaataaaatatgctattgaaacta

SEQ ID NO: 228 - DNA, 233 bp, Artificial
  Synthetic oligonucleotide
cacctcataatcatgtgaaaaagacactcaaaaactaccatttgaatggatggatgaaaataacctccgtatattctacgaagatgtttaataataaataggtttcgttataagagaatgtgtgtcacttcgtctcttccctcacccccgagacttagtgacagttatttttgacttttccaactatactatttgcctagaaaatgtgtctattaaatagcgtattgagaaat

SEQ ID NO: 229 - DNA, 51 bp, Artificial
  Synthetic oligonucleotide
atgatgccgcagctccagcgttggagactcagcctcaaggagatgaagaag

SEQ ID NO: 230 - DNA, 75 bp, Artificial
  Synthetic oligonucleotide
atattgcatcacgttaccctaccctttggactgaacaggttaaaagtcggcagaacaaaaccaataagaattcag

SEQ ID NO: 231 - DNA, 83 bp, Artificial
  Synthetic oligonucleotide
gtacgagcagccgaaatgtgacaacacggccagggcccacccagccaaagcccgggacctgtacaagggccgccagctacaag

SEQ ID NO: 232 - DNA, 103 bp, Artificial
  Synthetic oligonucleotide
gttgtccgggtgccaaaaagcatgagtttctgaccagcgttctggacgcgctgtccacggacatggtccacgccgcctccgacccctcctcctcgtcaggcag

SEQ ID NO: 233 - DNA, 95 bp, Artificial
  Synthetic oligonucleotide
gaagtaagagaaacctgtgatggccagagcccagatgttcttaggaggcaagccaggagaagccgggtctgacttttcagctcagagacagcact

SEQ ID NO: 234 - DNA, 38 bp, Artificial
  Synthetic oligonucleotide
cccccagaggtcatgctgaaagtacgtctaatagacag

SEQ ID NO: 235 - DNA, 75 bp, Artificial
  Synthetic oligonucleotide
ctgatcctcctacctggtccaccccagggctaccggaaggtaaaatcttcacctgaaccaattatgagcagtctc

SEQ ID NO: 236 - DNA, 19 bp, Artificial
  Synthetic oligonucleotide
cttactgaaggtacagccg

SEQ ID NO: 237 - DNA, 65 bp, Artificial
  Synthetic oligonucleotide
ctactgtggttgagaggaaaggtgtctttttattgcttctagagacgttgaaagtgtgacctgag

SEQ ID NO: 238 - DNA, 107 bp, Artificial
  Synthetic oligonucleotide
acgtgtccaggtgtgtggccgaaaggaagtatacccaggagcaagcccggaaggagtttcagcaagtgttcattcctgagtgcaatgacgacggcacctacagtcag

SEQ ID NO: 239 - DNA, 100 bp, Artificial
  Synthetic oligonucleotide
gtccagtgtcacagctacacgggatactgctggtgcgtcacgcccaacgggaggcccatcagcggcactgccgtggcccacaagacgccccggtgcccgg

SEQ ID NO: 240 - DNA, 48 bp, Artificial
  Synthetic oligonucleotide
gttccgtaaatgaaaagttaccccaacgcgaaggcacaggaaaaacag

SEQ ID NO: 241 - DNA, 582 bp, Artificial
  Synthetic oligonucleotide
gtaagcaggggatgagggcacactgagctccctccagccctctcagcctcaaccctctggaggcccaggcatatgggcagggggactcctgaaccctactccaagcacagcctctgtctgactcccttgtccttcaagagaactgttctccaggtctcagggccaggatttccataggatcgcctgtggctttgattctattctagtgtctctgggtgggggtcctgggcaagtgtctttctgagtctcagtttctttatcggtaaaatgtacataatgagattgaaagtgctctgcaaagcactatgtgcactaagaatttattattcaggttgtttccatcatgttttctgaggtgaaatcacaaaggatcagtggagtttgaggattatctagttcaatgctttgagtttagagttttacggtgaaaatgagacttgtctcctgacactaagtctctctcaactatagcgctatcttgctattttctctatctcagaaggatccttgggcaggaggaaggatgtggatatgatttggctggtttctatgctgaagctcttatctgattttctctcacag

SEQ ID NO: 242 - DNA, 193 bp, Artificial
  Synthetic oligonucleotide
cttgattcctgccatatggaggaggctctggagtcctgctctgtgtggtccaggtcctttccaccctgagacttggctccaccactgatatcctcctttggggaaaggcttggcacacagcaggctttcaagaagtgccagttgatcaatgaataaataaacgagcctatttctctttgcaaaacctgcttct

SEQ ID NO: 243 - DNA, 190 bp, Artificial
  Synthetic oligonucleotide
gtgaaaagagacatcacaagcaattgagggaccaggaagtggatcctctagagatgaggaggcattctgctggatgacttttaaaaatgttttctccagagtcatctctctcattaacaatgttttttgtcttagaaatttcttgttgatttttaaacttacatgatttcttgttttggtatgaatacag

SEQ ID NO: 244 - DNA, 179 bp, Artificial
  Synthetic oligonucleotide
gctgcttcagtccttcaataagcccatcacactttttcaccatgtcatctatcagcactttttctgcagtgttacgaacatcagcttcatcactgtcagcctgcgttttgcctgcaacccatcaaatgaggtcaggagaggagttttccacttttggcttcatgttggtgctcaaaact

SEQ ID NO: 245 - DNA, 208 bp, Artificial
  Synthetic oligonucleotide
gtttcctgcttatgcaatagtagctgggagaggccgaaagaattctggtggggccacacccactggtgaaagaataaatagtgaggtttggcattggccatcagagtcactcctgccttcaccatgaagtccagcggcctcttccccttcctggtgctgcttgccctgggaactctggcaccttgggctgtggaaggctctggaaagt

SEQ ID NO: 246 - DNA, 37 bp, Artificial
  Synthetic oligonucleotide
ccttcaaagctggagtctgtcctcctaagaaatctgc

SEQ ID NO: 247 - DNA, 112 bp, Artificial
  Synthetic oligonucleotide
ccagtgccttagatacaagaaacctgagtgccagagtgactggcagtgtccagggaagaagagatgttgtcctgacacttgtggcatcaaatgcctggatcctgttgacacc

SEQ ID NO: 248 - DNA, 10 bp, Artificial
  Synthetic oligonucleotide
ccaaacccaa

SEQ ID NO: 249 - DNA, 4 bp, Artificial
  Synthetic oligonucleotide
caag

SEQ ID NO: 250 - DNA, 56 bp, Artificial
  Synthetic oligonucleotide
gaggaagcctgggaagtgcccagtgacttatggccaatgtttgatgcttaaccccc

SEQ ID NO: 251 - DNA, 90 bp, Artificial
  Synthetic oligonucleotide
ccaatttctgtgagatggatggccagtgcaagcgtgacttgaagtgttgcatgggcatgtgtgggaaatcctgcgtttcccctgtgaaag

SEQ ID NO: 252 - DNA, 340 bp, Artificial
  Synthetic oligonucleotide
cggagggagtgagagccagaggctgctgctgccgtttgcaagaactgcaggggaggaggacgctgccacccacagcctctagagctcattgcagctgggacagcccggagtgtggttagcagctcggcaagcgctgcccaggtcctggggtggtggcagccagcgggagcaggaaaggaagcatgttcccaggctgcccacgcctctgggtcctggtggtcttgggcaccagctgggtaggctgggggagccaagggacagaagcggcacagctaaggcagttctacgtggctgctcagggcatcagttggagctaccgacctgagcccacaaactcaag

SEQ ID NO: 253 - DNA, 123 bp, Artificial
  Synthetic oligonucleotide
gacttcttgggcctactttatatgctgaagtcggagacatcataaaagttcactttaaaaataaggcagataagcccttgagcatccatcctcaaggaattaggtacagtaaattatcagaag

SEQ ID NO: 254 - DNA, 213 bp, Artificial
  Synthetic oligonucleotide
gtgcttcttaccttgaccacacattccctgcggagaagatggacgacgctgtggctccaggccgagaatacacctatgaatggagtatcagtgaggacagtggacccacccatgatgaccctccatgcctcacacacatctattactcccatgaaaatctgatcgaggatttcaactcggggctgattgggcccctgcttatctgtaaaaaag

SEQ ID NO: 255 - DNA, 144 bp, Artificial
  Synthetic oligonucleotide
ggaccctaactgagggtgggacacagaagacgtttgacaagcaaatcgtgctactatttgctgtgtttgatgaaagcaagagctggagccagtcatcatccctaatgtacacagtcaatggatatgtgaatgggacaatgccag

SEQ ID NO: 256 - DNA, 222 bp, Artificial
  Synthetic oligonucleotide
atataacagtttgtgcccatgaccacatcagctggcatctgctgggaatgagctcggggccagaattattctccattcatttcaacggccaggtcctggagcagaaccatcataaggtctcagccatcacccttgtcagtgctacatccactaccgcaaatatgactgtgggcccagagggaaagtggatcatatcttctctcaccccaaaacatttgcaag

SEQ ID NO: 257 - DNA, 166 bp, Artificial
  Synthetic oligonucleotide
ctgggatgcaggcttacattgacattaaaaactgcccaaagaaaaccaggaatcttaagaaaataactcgtgagcagaggcggcacatgaagaggtgggaatacttcattgctgcagaggaagtcatttgggactatgcacctgtaataccagcgaatatggacaa

SEQ ID NO: 258 - DNA, 178 bp, Artificial
  Synthetic oligonucleotide
aaaatacaggtctcagcatttggataatttctcaaaccaaattggaaaacattataagaaagttatgtacacacagtacgaagatgagtccttcaccaaacatacagtgaatcccaatatgaaagaagatgggattttgggtcctattatcagagcccaggtcagagacacactcaaa

SEQ ID NO: 259 - DNA, 215 bp, Artificial
  Synthetic oligonucleotide
gcaggaacaacaccatgatcagagcagttcaaccaggggaaacctatacttataagtggaacatcttagagtttgatgaacccacagaaaatgatgcccagtgcttaacaagaccatactacagtgacgtggacatcatgagagacatcgcctctgggctaataggactacttctaatctgtaagagcagatccctggacaggcgaggaatacag

SEQ ID NO: 260 - DNA, 151 bp, Artificial
  Synthetic oligonucleotide
agggcagcagacatcgaacagcaggctgtgtttgctgtgtttgatgagaacaaaagctggtaccttgaggacaacatcaacaagttttgtgaaaatcctgatgaggtgaaacgtgatgaccccaagttttatgaatcaaacatcatgagca

SEQ ID NO: 261 - DNA, 153 bp, Artificial
  Synthetic oligonucleotide
gtaagtcagagtactatttttgttcatcagtttttcattcctgtggttgaaatatgactgtgcctagagtcagagacatggattaaaatctactcgctaaggggcacctccaatcctcacttccagtccaaagacttggtgatgaaatccgtg

SEQ ID NO: 262 - DNA, 213 bp, Artificial
  Synthetic oligonucleotide
ctatcaatggctatgtgcctgagagcataactactcttggattctgctttgatgacactgtccagtggcacttctgtagtgtggggacccagaatgaaattttgaccatccacttcactgggcactcattcatctatggaaagaggcatgaggacaccttgaccctcttccccatgcgtggagaatctgtgacggtcacaatggataatgttg

SEQ ID NO: 263 - DNA, 1609 bp, Artificial
  Synthetic oligonucleotide
gaacttggatgttaacttccatgaattctagtccaagaagcaaaaagctgaggctgaaattcagggatgttaaatgtatcccagatgatgatgaagactcatatgagatttttgaacctccagaatctacagtcatggctacacggaaaatgcatgatcgtttagaacctgaagatgaagagagtgatgctgactatgattaccagaacagactggctgcagcattaggaattaggtcattccgaaactcatcattgaaccaggaagaagaagagttcaatcttactgccctagctctggagaatggcactgaattcgtttcttcgaacacagatataattgttggttcaaattattcttccccaagtaatattagtaagttcactgtcaataaccttgcagaacctcagaaagccccttctcaccaacaagccaccacagctggttccccactgagacacctcattggcaagaactcagttctcaattcttccacagcagagcattccagcccatattctgaagaccctatagaggatcctctacagccagatgtcacagggatacgtctactttcacttggtgctggagaattcagaagtcaagaacatgctaagcgtaagggacccaaggtagaaagagatcaagcagcaaagcacaggttctcctggatgaaattactagcacataaagttgggagacacctaagccaagacactggttctccttccggaatgaggccctgggaggaccttcctagccaagacactggttctccttccagaatgaggccctggaaggaccctcctagtgatctgttactcttaaaacaaagtaactcatctaagattttggttgggagatggcatttggcttctgagaaaggtagctatgaaataatccaagatactgatgaagacacagctgttaacaattggctgatcagcccccagaatgcctcacgtgcttggggagaaagcacccctcttgccaacaagcctggaaagcagagtggccacccaaagtttcctagagttagacataaatctctacaagtaagacaggatggaggaaagagtagactgaagaaaagccagtttctcattaagacacgaaaaaagaaaaaagagaagcacacacaccatgctcctttatctccgaggacctttcaccctctaagaagtgaagcctacaacacattttcagaaagaagacttaagcattcgttggtgcttcataaatccaatgaaacatctcttcccacagacctcaatcagacattgccctctatggattttggctggatagcctcacttcctgaccataatcagaattcctcaaatgacactggtcaggcaagctgtcctccaggtctttatcagacagtgcccccagaggaacactatcaaacattccccattcaagaccctgatcaaatgcactctacttcagaccccagtcacagatcctcttctccagagctcagtgaaatgcttgagtatgaccgaagtcacaagtccttccccacagatataagtcaaatgtccccttcctcagaacatgaagtctggcagacagtcatctctccagacctcagccaggtgaccct

SEQ ID NO: 264 - DNA, 170 bp, Artificial
  Synthetic oligonucleotide
ctctccagaactcagccagacaaacctctctccagacctcagccacacgactctctctccagaactcattcagagaaacctttccccagccctcggtcagatgcccatttctccagacctcagccatacaaccctttctccagacctcagccatacaaccctttctttag

SEQ ID NO: 265 - DNA, 1042 bp, Artificial
  Synthetic oligonucleotide
acctcagccagacaaacctctctccagaactcagtcagacaaacctttctccagccctcggtcagatgcccctttctccagacctcagccatacaaccctttctctagacttcagccagacaaacctctctccagaactcagccatatgactctctctccagaactcagtcagacaaacctttccccagccctcggtcagatgcccatttctccagacctcagccatacaaccctttctctagacttcagccagacaaacctctctccagaactcagtcaaacaaacctttccccagccctcggtcagatgcccctttctccagaccccagccatacaaccctttctctagacctcagccagacaaacctctctccagaactcagtcagacaaacctttccccagacctcagtgagatgcccctctttgcagatctcagtcaaattccccttaccccagacctcgaccagatgacactttctccagaccttggtgagacagatctttccccaaactttggtcagatgtccctttccccagacctcagccaggtgactctctctccagacatcagtgacaccacccttctcccggatctcagccagatatcacctcctccagaccttgatcagatattctacccttctgaatctagtcagtcattgcttcttcaagaatttaatgagtcttttccttatccagaccttggtcagatgccatctccttcatctcctactctcaatgatacttttctatcaaaggaatttaatccactggttatagtgggcctcagtaaagatggtacagattacattgagatcattccaaaggaagaggtccagagcagtgaagatgactatgctgaaattgattatgtgccctatgatgacccctacaaaactgatgttaggacaaacatcaactcctccagagatcctgacaacattgcagcatggtacctccgcagcaacaatggaaacagaagaaattattacattgctgctgaagaaatatcctgggattattcagaatttgtacaaag

SEQ ID NO: 266 - DNA, 237 bp, Artificial
  Synthetic oligonucleotide
gttcgttttaaaaatttagcatccagaccgtattctctacatgcccatggactttcctatgaaaaatcatcagagggaaagacttatgaagatgactctcctgaatggtttaaggaagataatgctgttcagccaaatagcagttatacctacgtatggcatgccactgagcgatcagggccagaaagtcctggctctgcctgtcgggcttgggcctactactcagctgtgaaccca

SEQ ID NO: 267 - DNA, 211 bp, Artificial
  Synthetic oligonucleotide
gaaaaagatattcactcaggcttgataggtcccctcctaatctgccaaaaaggaatactacataaggacagcaacatgcctgtggacatgagagaatttgtcttactatttatgacctttgatgaaaagaagagctggtactatgaaaagaagtcccgaagttcttggagactcacatcctcagaaatgaaaaaatcccatgagtttcacg

SEQ ID NO: 268 - DNA, 180 bp, Artificial
  Synthetic oligonucleotide
ccattaatgggatgatctacagcttgcctggcctgaaaatgtatgagcaagagtgggtgaggttacacctgctgaacataggcggctcccaagacattcacgtggttcactttcacggccagaccttgctggaaaatggcaataaacagcaccagttaggggtctggccccttctgcctg

SEQ ID NO: 269 - DNA, 156 bp, Artificial
  Synthetic oligonucleotide
gtggacatgcaaaaggaagtcataatcacagggatccagacccaaggtgccaaacactacctgaagtcctgctataccacagagttctatgtagcttacagttccaaccagatcaactggcagatcttcaaagggaacagcacaaggaatgtgatg

SEQ ID NO: 270 - DNA, 138 bp, Artificial
  Synthetic oligonucleotide
tattttaatggcaattcagatgcctctacaataaaagagaatcagtttgacccacctattgtggctagatatattaggatctctccaactcgagcctataacagacctacccttcgattggaactgcaaggttgtgag

SEQ ID NO: 271 - DNA, 152 bp, Artificial
  Synthetic oligonucleotide
gatgttccacacccctgggtatggaaaatggaaagatagaaaacaagcaaatcacagcttcttcgtttaagaaatcttggtggggagattactgggaacccttccgtgcccgtctgaatgcccagggacgtgtgaatgcctggcaagccaag

SEQ ID NO: 272 - DNA, 136 bp, Artificial
  Synthetic oligonucleotide
gcaaacaacaataagcagtggctagaaattgatctactcaagatcaagaagataacggcaattataacacagggctgcaagtctctgtcctctgaaatgtatgtaaagagctataccatccactacagtgagcagg

SEQ ID NO: 273 - DNA, 1180 bp, Artificial
  Synthetic oligonucleotide
aaggaaatactaataccaaaggacatgtgaagaactttttcaaccccccaatcatttccaggtttatccgtgtcattcctaaaacatggaatcaaagtattgcacttcgcctggaactctttggctgtgatatttactagaattgaacattcaaaaacccctggaagagactctttaagacctcaaaccatttagaatgggcaatgtattttacgctgtgttaaatgttaacagttttccactatttctctttcttttctattagtgaataaaattttatacaagaagcttttataatgtaactccttgctaccagtaagtaagataatggctattacttctgcattaatttgaatacaggtaggaaaatatcaagaaccaacaagaaaagggcttatctttcttaatgattgaaaatgctatgaagtaatatttatgtagttaaaatgcttcattataactcttttaaatcctttacacactagtaaaacagatattactttaaataataattgatagacctggataactttcacaaacacatgattttttaatggtttttcttgagtgaagagaaaaacaatattatcaaatgaaataagtacttaaaatatcctgtctttcccatataacaatgatttttctgactttccatgagtaaaaaaacagccaagcatctttccagtagccccattgaaattgtgaatccgtcctggtctccctaaggactgcacacattgatattcaaggttggtggtcattagatatggaacagaactgaaataaccatggtagaactgaatgtgtaatgttggctttattctagctggtactacatggcacacagtttcaaaacataatttcacctactggaaagctcagacctgtaaaacagagcatgggaactgctggtctaaatgcagttgttcctgctcaaagagacctctggccaaactggcaagcagttaaagttttctttcagggccttcctctctatggcctcaacttcctcctctctcttcttccagcaacttcccctttcatcattcctttccctggggacttggcattcagtgatcctgtagatattgcacaactggggaacctttagacatccttaaaatcacatgagatagacagtcatttggggtgtctgaaataaaccaccccaaaacttagt

SEQ ID NO: 274 - DNA, 92 bp, Artificial
  Synthetic oligonucleotide
tttgaatctttctgtaacttcctttaagaaaattgtctacagagagtatgaaccatattttaagaaagaaaaaccacaatctaccatttcag

SEQ ID NO: 275 - DNA, 100 bp, Artificial
  Synthetic oligonucleotide
atcgtgttcaaaaatatggccagccgcccctatagcatttaccctcatggagtgaccttctcgccttatgaagatgaagtcaactcttctttcacctcag

SEQ ID NO: 276 - DNA, 55 bp, Artificial
  Synthetic oligonucleotide
ggaaacagatattgaagactctgatgatattccagaagataccacatataagaaa

SEQ ID NO: 277 - DNA, 52 bp, Artificial
  Synthetic oligonucleotide
gtagtttttcgaaagtacctcgacagcacttttaccaaacgtgatcctcgag

SEQ ID NO: 278 - DNA, 68 bp, Artificial
  Synthetic oligonucleotide
gggagtatgaagagcatctcggaattcttggtcctattatcagagctgaagtggatgatgttatccaa

SEQ ID NO: 279 - DNA, 117 bp, Artificial
  Synthetic oligonucleotide
gttcatttaaaactcttgaaatgaaggcatcaaaacctggctggtggctcctaaacacagaggttggagaaaaccagagagcagggatgcaaacgccatttcttatcatggacagag

SEQ ID NO: 280 - DNA, 72 bp, Artificial
  Synthetic oligonucleotide
actgtaggatgccaatgggactaagcactggtatcatatctgattcacagatcaaggcttcagagtttctgg

SEQ ID NO: 281 - DNA, 104 bp, Artificial
  Synthetic oligonucleotide
gttactgggagcccagattagcaagattaaacaatggtggatcttataatgcttggagtgtagaaaaacttgcagcagaatttgcctctaaaccttggatccag

SEQ ID NO: 282 - DNA, 7 bp, Artificial
  Synthetic oligonucleotide
gtaaatg

SEQ ID NO: 283 - DNA, 47 bp, Artificial
  Synthetic oligonucleotide
gagtggaatggaaaccatacaggctgaaatcctccatggtggacaag

SEQ ID NO: 284 - DNA, 7 bp, Artificial
  Synthetic oligonucleotide
atttttg

SEQ ID NO: 285 - DNA, 1543 bp, Artificial
  Synthetic oligonucleotide
agcacacatgatcttaactgggtctcttctcctgaatccctggggaaagagaaagacgcctacagcacttttttccactgcccctctgtggtcagcctttggtgaggggaactggaagggccttctagatcacacatccaactccctcaattataaatgagggcactgtggaccagaggagccaagggctttctccagggtcacacagtggaccaatgtcagggaccaggagggtccagatccctcagttcccaagccctacatcctcacgtccagcatgcacgtgcaaggccagcatgcccagcctggaactggagacgccgatcagagggcctggcaggctgctgccggtgcccatctcacaggccccgagggctgataaggatgcccttgaaggtgattgatggtttgcaaagcacccacttattagtatttccactggacctctgaaaacagtgatggagatagagagattgcatgtaacttgggacttgggaggtggcctgaaatgactgtgacccagctgatttctctgaggacttaggaggaaatatctgaagttggactcttcttgactgggccaaaaccagatgcttccccggcttctttgcacatacttttccccgtgctttcttgttgaaataagcagcattgtggagtgagaggcatttggaatgtgactcctccgtttacttactcctccacctaggcagaatactttgcttctgtttcctttgtgtaaaatgggaagacgatagaacctccttggttaggactgtggtgaggtgtcagtgaattaatgcgaaatccacatagaaccatgcactatcacaagcgtttgccattatcattcatagtgttagcattcataagcggcatgattgtcccagcagccttgagaaagggtggggagagcactttaatccgtgcttcacagatgaggaaactgaggcacagagaaggtccccagccttcccaagaccccacagtaggtgagttgcagggttagtctgctgtgtcccagatctgtgttctttctgccatgctgcattgccactcagagaggaacaacctgatctagaaagtgaaattttttccagccgcagctgctgcggctacatttgtgaatcagctctgtaaatacaagtttaatacgcgttgttcctgctcagtgggcgttgatagcccagccctggaagagcctttaagaacaggccttaaatagacacaccagctccatgcttcagttttgggaggctgtaccccataaaggaagggtgcaagggcctgtgggctgacaggaattacagaccggcttccaggtggccccaccacctgtgctgggcccctgctgggctcacttgactgtccctgagcccatcactcacccttttggagcaatttttgaaacagaccgctaagtacccaggttattagctggtctcatccctaccatgccggggaacagcatttggatcaccgcagtagcagcccaaggagacacacaagtagctgctttctcggactgtattattttctgaaa

SEQ ID NO: 286 - DNA, 385 bp, Artificial
  Synthetic oligonucleotide
gtaagaaactttccctgggcagaactctttctagttcccatggggatgggcaggataggcgagaggccgagcccccacttccaggtctctgggcagggcggggttaggcagcagcgggtgtcactcacacagtgactttcacttgtgctttcagtgctcaggacatgggcacctgccggcttccttctagcccggttggacagctccggcagctggtttggggaggtaaaattataggagcgtgatgtcacccgggccactcagggcagagcctggctgctgggcagaagggcacttgggccgggctgcttcagccgagagggccattcggtgtcctgcccacagagagagaaacagtgagagaccaagagagcaaaccagagag

SEQ ID NO: 287 - DNA, 250 bp, Artificial
  Synthetic oligonucleotide
atagggagggggaatgcaaggggtccctgggggactcaggagtcccagtggagaatgagaggcaggccccccgtggtggccggggccctggctgccagaggaccgggctggtgaggaggcgaggatgtggactttcgtcacccagctgttggtcacgctggtgctgctgagcttcttcctggtcagctgtcagaacgtgatgcacattgtcagggggtccctgtgctttgtgctaaagcacatccaccag

SEQ ID NO: 288 - DNA, 135 bp, Artificial
  Synthetic oligonucleotide
gtgggtgcagagtgttcccctctgtgctggggagaggcaggtgggctagaagctaaaaggtggtagaagccagtggcttctccctgctgccctcacagcaggtgagcacagccaggctggctgcccccgtgctca

SEQ ID NO: 289 - DNA, 135 bp, Artificial
  Synthetic oligonucleotide
gtggagctgagagggagtggcctacagccggacctgatagagggcaggaagggggcgcagatagtgaagcgggccagcctgaaaagggggaaacagtgaccccgagccgctctccttggagtagcctctcgggag

SEQ ID NO: 290 - DNA, 140 bp, Artificial
  Synthetic oligonucleotide
ctgccatgcacacaggaggagagctggacctgagggccaccgcagcggtgcacacattcctctgggctgacggcatgacctctgtaagggactcctgctagtcccctcttggcatgaatgactgactgtagacgcatgac

SEQ ID NO: 291 - DNA, 414 bp, Artificial
  Synthetic oligonucleotide
ggatagaaaacaagcgcaggagagcctgcgaacgcaaaagtgaatgagggctttttgtggctggggatgggttttggttttggggttttttttttaaattgttttgacttcgtacagggtactttttcccaacctcatctgtcagaaatccatgtgggcttcctggaaagaaaaaaaaaaaaaaagaaaactaggcatgaaatcagtttaacaccttaatcttaagccatgtcctcatctgcccaccctccccaacccacatacctccattccacttgtgacaccccctcgactccctggtgacgctcctcccagatcgctctacatgacattcaggacacacacacacacacacacacacacaccactcgcctccactgaatctacacacagattttactgtgacttctgaag

SEQ ID NO: 292 - DNA, 1190 bp, Artificial
  Synthetic oligonucleotide
ctgtggataaattggaattttttatgttgtctctctctctgccaatttcaatacgaatcatcttccaatggaaaatcattaccttgaagagtgcattcggggttccttgtgttagggacttaagaatctgaggcgaggacccccaggcttacctgtaggactcaaagggagccaggaccccatctgaaagggtctcctctctcagttgggggacaggccggtggctgacccaggattgcaccagcatgtccatagagaagaggttttctatgtcttcaagcactatatcatagtccgtgttcaaagtgtaaactgtacagtaatcagccttgtgtatatgaaaaacaataaatactatgcaaaccaatagaaacatttagcagtacgtacagagcctgacagcgcagctcctgaggacttctgcggctgcaggagaaggagctgtggcctgtctttcagtgaaagaggaaggaaaggagtagggctagtgaatgtatctgccaggtcttagaagtcaggaccacccagggtctcccagagtgaacttggtgctctaagtccaggcagcctgcaggctggggaccctgggtgcaggtgccaggctcgaggctgttccctgtcctgcctcagtgcctcccctctgcccagcccctgtggcctcttggagaggcgagccagggggctccccggaccgcatggccggtgagagtagagtcggaggcggagagcctggacgcccagaggccggggccaggctctgggtcaaggcaggaaggagacagacagctggcagttcctcgcctcggtgccatcagggaggagccttaagttccactagagcctccggcccagggaggccagaatcagcacaatcccggccccgccctcgcggcgggcgcccccagggccaggagagagagacagggctggctcctctcgcccctggagccgcggtgtggacggcccggccccgtccgccccgccgctctgcgggagtgtcctcgggacacacttaaaccttccaagtagcacagaagccccctccacgtcagaggccccctggccgcggggcctgtgagcggagaggggccctgcttcccacacaaatccgccccggtgcacccccggccaggcaggccccggggcggcctaggcgccttgtcggccgggggtggggctgcttttgcttc

SEQ ID NO: 293 - DNA, 359 bp, Artificial
  Synthetic oligonucleotide
ctttagaggggcgggcagggagaggaagctctagctccgggcctgagtttccccgaggctgcgtcggaggagctgcagggcgagcccggacggctgccgtctccgccagaggccaccccggcccggcctccagggcgcagaggcgcccccctccatcctcccccatcccgggggccacggcaggggggccgcacagcgcggctgggaccgattcggtgacggcccaaggaagctgggcgcagggctcgcctctcccgcctcgatcctgcaccttcctctcccaggtcgctgctgcagccaacccagtagcccccttagcgcccccgcggaccccgcagctccagactccgctttggcac

SEQ ID NO: 294 - DNA, 303 bp, Artificial
  Synthetic oligonucleotide
ctctgctccggctggcatggctgcacgctccggctgctagtaggagccgttaggggaggagtttggggtctccacacgatgcctagagaatgctgcagtctgcacattagacgctttttagaagttttgaaattaccttgatttttttaattgttatgaaaatggatcttttcttgactctcccacatgctctgttatgggagagaatcccctaccctactctgatgtatagaccattctcccttcaccagccgaaccaatgtcaaaattaataaagaaatggactaatggcacagggctcta

SEQ ID NO: 295 - DNA, 62 bp, Artificial
  Synthetic oligonucleotide
gagctggacaaggagctgggggagagcgagggcctcagtgacgacgaggagaccatctccac

SEQ ID NO: 296 - DNA, 31 bp, Artificial
  Synthetic oligonucleotide
cagggtggtccggcggcgggtcttcctgaag

SEQ ID NO: 297 - DNA, 77 bp, Artificial
  Synthetic oligonucleotide
gggaatgagtttcagaatattccaggggagcaggtgacagaggagcaattcacggatgagcagggcaacattgtcac

SEQ ID NO: 298 - DNA, 7 bp, Artificial
  Synthetic oligonucleotide
caagaag

SEQ ID NO: 299 - DNA, 32 bp, Artificial
  Synthetic oligonucleotide
atcattcgcaaggtggttcgacagatagactt

SEQ ID NO: 300 - DNA, 22 bp, Artificial
  Synthetic oligonucleotide
gtccagcgccgatgccgcccag

SEQ ID NO: 301 - DNA, 12 bp, Artificial
  Synthetic oligonucleotide
gagcacgaggag

SEQ ID NO: 302 - DNA, 42 bp, Artificial
  Synthetic oligonucleotide
gtgactgtagaggggcccctggaggatcccagtgagctggag

SEQ ID NO: 303 - DNA, 33 bp, Artificial
  Synthetic oligonucleotide
gtcgatattgattactttatgaaacactccaag

SEQ ID NO: 304 - DNA, 39 bp, Artificial
  Synthetic oligonucleotide
gatcacacctcgacacccaacccctgaaccccacacact

SEQ ID NO: 305 - DNA, 85 bp, Artificial
  Synthetic oligonucleotide
ctccaggcttcaatcctgcctcttgcaatgacagctgatctgtcggaaccaggacacaaaagcagcaagaagcggggagagagag

SEQ ID NO: 306 - DNA, 14 bp, Artificial
  Synthetic oligonucleotide
ctgtatagactctg

SEQ ID NO: 307 - DNA, 679 bp, Artificial
  Synthetic oligonucleotide
gagctggagagagcgagagcaaagagcgagcgagggagaggagagagagagagaggagagagaaagacacacgcacgcagagacacacggtcactggaattccattagaaaaaagtgagccgagcaagggttagcgggagaagatttttttgaatcttgtcttcgtcttggtgcgaaagaagcgactccagtctctcgtcctcgaagctccgactggattgttcttgggcgctgacacccgtctgtggatttcttttctatttgcattttattccgaccccctccctcgccgcttccttccagcccttcactcgcaaatcgcctctctccccacctccccaggcccctcctgggaagcgcaggggaattggacccgcggggactcacgccttcccggacgattggaggggagggctgaccccaggactgggctgttggcttagaaagccgatacacagatacgcgtatatttgattgtagcgggcaaggggggcgtcgagaggcagcagcccatcgcccgcctctcaccccaccccctccagccagaggcgagaatcgcaggactcgggatcttcatcgggtggactagctgggatctccgcattggatttggggctgattaccactgcttgcctattattattgttgttgttactactattatttttttttacccaag

SEQ ID NO: 308 - DNA, 274 bp, Artificial
  Synthetic oligonucleotide
ggccccgagctccacggctggcgccccccagtggactgtgtccgggccaatgagctgtgtgccgccgaatccaactgcagctctcgctaccgcactctgcggcagtgcctggcaggccgcgaccgcaacaccatgctggccaacaaggagtgccaggcggccttggaggtcttgcaggagagcccgctgtacgactgccgctgcaagcggggcatgaagaaggagctgcagtgtctgcagatctactggagcatccacctggggctgaccgagg

SEQ ID NO: 309 - DNA, 355 bp, Artificial
  Synthetic oligonucleotide
ggacaggggcagacccggtggtcagcgccaagagcaaccattgcctggatgctgccaaggcctgcaacctgaatgacaactgcaagaagctgcgctcctcctacatctccatctgcaaccgcgagatctcgcccaccgagcgctgcaaccgccgcaagtgccacaaggccctgcgccagttcttcgaccgggtgcccagcgagtacacctaccgcatgctcttctgctcctgccaagaccaggcgtgcgctgagcgccgccggcaaaccatcctgcccagctgctcctatgaggacaaggagaagcccaactgcctggacctgcgtggcgtgtgccggactgaccacctgtgtcg

SEQ ID NO: 310 - DNA, 141 bp, Artificial
  Synthetic oligonucleotide
ggtttgacatgacacctaactatgtggactccagccccactggcatcgtggtgtccccctggtgcagctgtcgtggcagcgggaacatggaggaggagtgtgagaagttcctcagggacttcaccgagaacccatgcctcc

SEQ ID NO: 311 - DNA, 173 bp, Artificial
  Synthetic oligonucleotide
ggaacgccatccaggcctttggcaacggcacggacgtgaacgtgtccccaaaaggcccctcgttccaggccacccaggcccctcgggtggagaagacgccttctttgccagatgacctcagtgacagtaccagcttggggaccagtgtcatcaccacctgcacgtctgtccag

SEQ ID NO: 312 - DNA, 1387 bp, Artificial
  Synthetic oligonucleotide
ctcacgacaaatatcatcccagggagtaacaaggtgatcaaacctaactcaggccccagcagagccagaccgtcggctgccttgaccgtgctgtctgtcctgatgctgaaacaggccttgtaggctgtgggaaccgagtcagaagatttttgaaagctacgcagacaagaacagccgcctgacgaaatggaaacacacacagacacacacacaccttgcaaaaaaaaaattgtttttcccaccttgtcgctgaacctgtctcctcccaggtttcttctctggagaagtttttgtaaaccaaacagacaagcaggcaggcagcctgagagctggcccaggggtcccctggcaggggaaactctggtgccggggagggcacgaggctctagaaatgcccttcactttctcctggtgtttttctctctggacccttctgaagcagagaccggacaagagcctgcagcggaagggactctgggctgtgcctgaggctggctgggggcaggacaacacagctgcttccccaggctgcccactctggggacccgctgggggctggcagagggcatcggtcagcggggcagcggggctggccatgagggtccaccttcagccctttggcttcaaggatggagatggttttgccctccctctctgccctcgggtggggctggtgggtctgcagctggtgtgggaacttccccacggatggcggtggagggggttcgcaccgtgctgggctccccctgactgtagcacggagtgttggggctgggggccagctccaggagggcttgagagctcagcctgcctgggagagcccttgtggcgaggcattaaaacttgggcaccagcttctttctcggtggcagaaattttgaagtcagagagaaacggtcctttgttggcttctttgctttctcgtgggtcctttggcaggcctccctttggggagagggaggggagagaccacagccgggtgtgtgtctgcagcaccgtgggccctcaagctttcctgctgtcttctccctcctcctcctttcccctttctctttcctcatttcctagacgtacgtcaactgtatgtacataccggggctcctctcctaacatatatgtatatacacatccatatacatatattgtgtggtttcccctttctttcctttttttaagcaacaaaactatggaaataataccccaacagatgagcgaaaatgtattattgtaaagtttattttttttaatactgttgtctataatggggaaaaaggacattggccccgcagtgccctgccccagtcagcctggctgggctctggtgggggctcctgatccgcatccaagcttaaccaaggctccaataaacgtgctaggaagcaagctg

SEQ ID NO: 313 - DNA, 75 bp, Artificial
  Synthetic oligonucleotide
ggagaaagacaaaaaaacggtgggatttatttaacatgatcttggcaaacgtcttctgcctcttcttctttctag

SEQ ID NO: 314 - DNA, 84 bp, Artificial
  Synthetic oligonucleotide
gtgaggagttctacgaagcctccccctatgagccggtgacctcccgcctctcggacatcttcaggcttgcttcaatcttctcag

SEQ ID NO: 315 - DNA, 110 bp, Artificial
  Synthetic oligonucleotide
gtcccggctggccgacttccatgccaattgtcgagcctcctaccagacggtcaccagctgccctgcggacaattaccaggcgtgtctgggctcttatgctggcatgattg

SEQ ID NO: 316 - DNA, 54 bp, Artificial
  Synthetic oligonucleotide
gagcaggggctgaaggccaacaactccaaagagttaagcatgtgcttcacagag

SEQ ID NO: 317 - DNA, 424 bp, Artificial
  Synthetic oligonucleotide
acacagtactctcagcttgttggtggaagcccctcatctgccttcattctgaaggcagggcccggcagaggaaggatcagagggtcgcggccggagggtcccggccggtggggccaactcagagggagaggaaagggctagagacacgaagaacgcaaaccatcaaatttagaagaaaaagccctttgactttttccccctctccctccccaatggctgtgtagcaaacatccctggcgataccttggaaaggacgaagttggtctgcagtcgcaatttcgtgggttgagttcacagttgtgagtgcggggctcggagatggagccgtggtcctctaggtggaaaacgaaacggtggctctgggatttcaccgtaacaaccctcgcattgaccttcctcttccaagctagagaggtcagaggag

SEQ ID NO: 318 - DNA, 168 bp, Artificial
  Synthetic oligonucleotide
ctgctccagttgatgtactaaaagcactagattttcacaattctccagagggaatatcaaaaacaacgggattttgcacaaacagaaagaattctaaaggctcagatactgcttacagagtttcaaagcaagcacaactcagtgccccaacaaaacagttatttccag

SEQ ID NO: 319 - DNA, 214 bp, Artificial
  Synthetic oligonucleotide
gtggaactttcccagaagacttttcaatactatttacagtaaaaccaaaaaaaggaattcagtctttccttttatctatatataatgagcatggtattcagcaaattggtgttgaggttgggagatcacctgtttttctgtttgaagaccacactggaaaacctgccccagaagactatcccctcttcagaactgttaacatcgctgacgggaa

SEQ ID NO: 320 - DNA, 163 bp, Artificial
  Synthetic oligonucleotide
gtggcatcgggtagcaatcagcgtggagaagaaaactgtgacaatgattgttgattgtaagaagaaaaccacgaaaccacttgatagaagtgagagagcaattgttgataccaatggaatcacggtttttggaacaaggattttggatgaagaagtttttgag

SEQ ID NO: 321 - DNA, 129 bp, Artificial
  Synthetic oligonucleotide
ggggacattcagcagtttttgatcacaggtgatcccaaggcagcatatgactactgtgagcattatagtccagactgtgactcttcagcacccaaggctgctcaagctcaggaacctcagatagatgag

SEQ ID NO: 322 - DNA, 215 bp, Artificial
  Synthetic oligonucleotide
gtgaggagcacaagaccagagaaggtcttcgtatttcagtgatatggacatagcagtgcagtttttgaacttatacttatttattccattttaattaagctatgctttgtattttaattgtgttgtaatatttccaggaaaaagtgacttgaatatatttggtacttgttttcttgctgtttaagcatttgattacataaatttattagcaataa

SEQ ID NO: 323 - DNA, 214 bp, Artificial
  Synthetic oligonucleotide
ccaaatccagttgaagaaatatttactgaagaatatctaacgggagaggattatgattcccagaggaaaaattctgaggatacactatatgaaaacaaagaaatagacggcagggattctgatcttctggtagatggagatttaggcgaatatgatttttatgaatataaagaatatgaagataaaccaacaagcccccctaatgaagaatttg

SEQ ID NO: 324 - DNA, 430 bp, Artificial
  Synthetic oligonucleotide
gtctccttttctttctcattattttacaaaaaagtaattaagtttgcttgtgacaaaagatttgtaggaagacatgatgaaaggaaagttgtgaagttgtcattgccattatatctcatatatgaatagcaaatgatgttcttgttaataactcaatgtctggatcaaaacaagaataaatctataattaaacacatgtctttttccctgatctccactgtgagattccttgagtaatattttgtcccctgtagtcatagcacatttctatctggctctttccaacaccttttttctttcattatttttgttgatttctacaaacatattaattaaaaaaaactaatagctttatcgaagtgtaatttaaatactataaatattcccttgttttaagtgtacaagtgaattatttttactaaatttacag

SEQ ID NO: 325 - DNA, 639 bp, Artificial
  Synthetic oligonucleotide
atgtgctgcaatctaagtttcggaatacttataccactccagaaataatcctcgtgttaatattcagtccatgtttccaccccctcagacctagctaacaattaatttgctttctgtctctgtagatttgagttttctgaatatttcatgtgaatgaaacttatgaataaatttatgatttaatcatatgaatgtgtatgtgacctttatgtctgacttctttcattttaggttcatccatgctgtagcatacatatattagtactttgctccttattttgttctcatagtattccattgattgggtataccaggttctgtttacttttacttggcagttgatagaataggtgtagtttatactttttcgctattctccataccggtgctgtagtgaataattgcatacaagtctttgtatagatgtgttttcattctttttggtatatacttagaagcagaattcttgtgttatggtaaacttatattcaatattttgtgaattccactcttttccatatcgattgtaccattttcccttccaagtaaccatgtatgaggatagtcatttctgcacattctcactaatgcttgttattgtctgtcttcttgattacgatcattctcgttggtgtgaaa

SEQ ID NO: 326 - DNA, 129 bp, Artificial
  Synthetic oligonucleotide
gtaagtatgatgataataaatagccagacaatcatggttgtgaattacagctcttctttcattactctcatgctgtgattccacagtgtgtgggagagaaaataaacacatgtcaatcaaatcagtcaa

SEQ ID NO: 327 - DNA, 117 bp, Artificial
  Synthetic oligonucleotide
tatgcaccagaggatataatcgaatatgactatgagtatggggaagcagagtataaagaggctgaaagtgtaacagagggacccactgtaactgaggagacaatagcacagacggag

SEQ ID NO: 328 - DNA, 93 bp, Artificial
  Synthetic oligonucleotide
gcaaacatcgttgatgattttcaagaatacaactatggaacaatggaaagttaccagacagaagctcctaggcatgtttctgggacaaatgag

SEQ ID NO: 329 - DNA, 41 bp, Artificial
  Synthetic oligonucleotide
gtccaggtgtaccagcagaaactgatattacagaaacaagc

SEQ ID NO: 330 - DNA, 63 bp, Artificial
  Synthetic oligonucleotide
ataaatggccatggtgcatatggagagaaaggacagaaaggagaaccagcagtggttgagcct

SEQ ID NO: 331 - DNA, 42 bp, Artificial
  Synthetic oligonucleotide
ggtatgcttgtcgaaggaccaccaggaccagcaggacctgca

SEQ ID NO: 332 - DNA, 63 bp, Artificial
  Synthetic oligonucleotide
ggtattatgggtcctccaggtctacaaggccccactggaccccctggtgaccctggcgatagg

SEQ ID NO: 333 - DNA, 75 bp, Artificial
  Synthetic oligonucleotide
ggccccccaggacgtcctggcttaccaggggctgatggtctacctggtcctcctggtactatgttgatgttaccg

SEQ ID NO: 334 - DNA, 84 bp, Artificial
  Synthetic oligonucleotide
ttccgttatggtggtgatggttccaaaggaccaaccatctctgctcaggaagctcaggctcaagctattcttcagcaggctcgg

SEQ ID NO: 335 - DNA, 57 bp, Artificial
  Synthetic oligonucleotide
attgctctgagaggcccacctggcccaatgggtctaactggaagaccaggtcctgtg

SEQ ID NO: 336 - DNA, 54 bp, Artificial
  Synthetic oligonucleotide
ggggggcctggttcatctggggccaaaggtgagagtggtgatccaggtcctcag

SEQ ID NO: 337 - DNA, 54 bp, Artificial
  Synthetic oligonucleotide
ggccctcgaggcgtccagggtccccctggtccaacgggaaaacctggaaaaagg

SEQ ID NO: 338 - DNA, 54 bp, Artificial
  Synthetic oligonucleotide
ggtcgtccaggtgcagatggaggaagaggaatgccaggagaacctggggcaaag

SEQ ID NO: 339 - DNA, 54 bp, Artificial
  Synthetic oligonucleotide
ggagatcgagggtttgatggacttccgggtctgccaggtgacaaaggtcacagg

SEQ ID NO: 340 - DNA, 54 bp, Artificial
  Synthetic oligonucleotide
ggtgaacgaggtcctcaaggtcctccaggtcctcctggtgatgatggaatgagg

SEQ ID NO: 341 - DNA, 45 bp, Artificial
  Synthetic oligonucleotide
ggagaagatggagaaattggaccaagaggtcttccaggtgaagct

SEQ ID NO: 342 - DNA, 54 bp, Artificial
  Synthetic oligonucleotide
ggcccacgaggtttgctgggtccaaggggaactccaggagctccagggcagcct

SEQ ID NO: 343 - DNA, 45 bp, Artificial
  Synthetic oligonucleotide
ggtatggcaggtgtagatggccccccaggaccaaaagggaacatg

SEQ ID NO: 344 - DNA, 54 bp, Artificial
  Synthetic oligonucleotide
ggtccccaaggggagcctgggcctccaggtcaacaagggaatccaggacctcag

SEQ ID NO: 345 - DNA, 45 bp, Artificial
  Synthetic oligonucleotide
ggtcttcctggtccacaaggtccaattggtcctcctggtgaaaaa

SEQ ID NO: 346 - DNA, 54 bp, Artificial
  Synthetic oligonucleotide
ggaccacaaggaaaaccaggacttgctggacttcctggtgctgatgggcctcct

SEQ ID NO: 347 - DNA, 45 bp, Artificial
  Synthetic oligonucleotide
ggtcatcctgggaaagaaggccagtctggagaaaagggggctctg

SEQ ID NO: 348 - DNA, 54 bp, Artificial
  Synthetic oligonucleotide
ggtccccctggtccacaaggtcctattggatacccgggcccccggggagtaaag

SEQ ID NO: 349 - DNA, 45 bp, Artificial
  Synthetic oligonucleotide
ggagcagatggtgtcagaggtctcaagggatctaaaggtgaaaag

SEQ ID NO: 350 - DNA, 54 bp, Artificial
  Synthetic oligonucleotide
ggtgaagatggttttccaggattcaaaggtgacatgggtctaaaaggtgacaga

SEQ ID NO: 351 - DNA, 108 bp, Artificial
  Synthetic oligonucleotide
ggagaagttggtcaaattggcccaagaggggaagatggccctgaaggacccaaaggtcgagcaggcccaactggagacccaggtccttcaggtcaagcaggagaaaag

SEQ ID NO: 352 - DNA, 54 bp, Artificial
  Synthetic oligonucleotide
ggaaaacttggagttccaggattaccaggatatccaggaagacaaggtccaaag

SEQ ID NO: 353 - DNA, 54 bp, Artificial
  Synthetic oligonucleotide
ggttccactggattccctgggtttccaggtgccaatggagagaaaggtgcacgg

SEQ ID NO: 354 - DNA, 45 bp, Artificial
  Synthetic oligonucleotide
ggagtagctggcaaaccaggccctcggggtcagcgtggtccaacg

SEQ ID NO: 355 - DNA, 54 bp, Artificial
  Synthetic oligonucleotide
ggtcctcgaggttcaagaggtgcaagaggtcccactgggaaacctgggccaaag

SEQ ID NO: 356 - DNA, 45 bp, Artificial
  Synthetic oligonucleotide
ggcacttcaggtggcgatggccctcctggccctccaggtgaaaga

SEQ ID NO: 357 - DNA, 54 bp, Artificial
  Synthetic oligonucleotide
ggtcctcaaggacctcagggtccagttggattccctggaccaaaaggccctcct

SEQ ID NO: 358 - DNA, 54 bp, Artificial
  Synthetic oligonucleotide
ggaccacctgggaaggatgggctgccaggacaccctgggcaacgtggggagact

SEQ ID NO: 359 - DNA, 54 bp, Artificial
  Synthetic oligonucleotide
ggatttcaaggcaagaccggccctcctgggccagggggagtggttggaccacag

SEQ ID NO: 360 - DNA, 108 bp, Artificial
  Synthetic oligonucleotide
ggaccaaccggtgagactggtccaataggggaacgtgggcatcctggccctcctggccctcctggtgagcaaggtcttcctggtgctgcaggaaaagaaggtgcaaag

SEQ ID NO: 361 - DNA, 90 bp, Artificial
  Synthetic oligonucleotide
ggtgatccaggtcctcaaggtatctcagggaaagatggaccagcaggattacgtggtttcccaggggaaagaggtcttcctggagctcag

SEQ ID NO: 362 - DNA, 54 bp, Artificial
  Synthetic oligonucleotide
ggtgcacctggactgaaaggaggggaaggtccccagggcccaccaggtccagtt

SEQ ID NO: 363 - DNA, 1133 bp, Artificial
  Synthetic oligonucleotide
tgagacaagatgtcactctgtcacccaggctggagtgcagtggcaggatcacggctcactgcagcctcgacctccctgggctcaggtgatcctcccacctcagcctaccgagtagctgggactacaggtgcatgtcaccatacccggttaatttttgtattttttttagagacaaggtctcaccatgttgcccaggctggtctcaaactcctgtgctcaggcaatgcgtcagcctcgacatctcaaagtgctgtgattacaggcgtgagccccgacacctggcctagttctattttctaaatgtgaattctgtaaagatatcttttaaaaataaagttctgtttttggtagaaaatgtaaaaatagataaatatggagggaagaaatcccccctggaatacagacgcttcctctcccttccagccttttccccatatgaacattgctgtgagtgagacttacatgcaatgtaatttctttttgagcttaacattacaacataaattctcaaactctgatgttcattaaacaccccagccccatcctgggaacttgggcttggggctcggggtgttctgataatgatcaaagtatgagaattgaacccatgaggactttgatccaagatactggggtgtggggaggggcaggcacaggtgtcctgggaacacactttgagaagcaatggcaaagctgggggtccagctaatgtgttacattagaatcacctcggggaggccctgggtgcccttctcagccctccctccggaggctgctgaagcccagcaaagccggagtcagagaacaatgtccgcctgagggcagggctgggctgggctggccttctggccctatctgctccgtgcccaacccagcgccccgcacagtcggagctttgtaaatacgaggtgactgtctgcctacaaactttgtaaacatcacttgaaatggccgcagggcattgcgacatggccataccactatttgtttgctattgaatttgtacttccctgccttacttttgctattgcaaaccatgctgtcactaaggtcttcatgcacacagttgtgtcttggtcagatgatatgtttctaccaattttaattgtgtttctttccacctggacacacag

SEQ ID NO: 364 - DNA, 790 bp, Artificial
  Synthetic oligonucleotide
ctctctggcccagggctgggtcatcagcacaccctgctgctgctgttcagatctgcatcctggtcccgcttggtcccacagtgagaacgctttgctatcacatgggcaggctctgagagccctgccggcctggccttctcaaagaagacctgagagcttgggacccaagcagagaggaagaacagggctcagggtgcttgctccatgctcgctccacacctggggctcaaccctggctttccccggctccctgtgtgacttcagggcaggtcccttgggccctctgggccttatcatcttcatctgtaacagggcgatgcctctgccgtgtctggtggtgttgaggagttcctgtttgtgtaagcagctagttcagtgccagcacgagatgggaggcccatgaagttagcagtgcacaaaaaatagagcaaagactggatgcatttcctgagaacaaccatcactgtaaagcactttacaaatccaaagacaacccccggcaaaaactcaaaatgaaactccctctcgcagagcacaattccaattcgctctaaaaacattacaagttagttcatgtcatgccagatagctgaaggcagctcacaagttcttaaggccaggaatgccatgtgtctgctatgcacagctggccctggccctgagcctgaatgacagcacaaaggtgacgcagatgtgggtgccctgctcctgcccagcagcagtgcttggtggaggctgaggccctgcacaggcaccctcactgctgaccttgagcctctctctcctctag

SEQ ID NO: 365 - DNA, 643 bp, Artificial
  Synthetic oligonucleotide
agtggaaaagacaaggatgccgtggataaattgctcaaggacctggacgccaatggagatgcccaggtggacttcagtgagttcatcgtgttcgtggctgcaatcacgtctgcctgtcacaagtactttgagaaggcaggactcaaatgatgccctggagatgtcacagattcctggcagagccatggtcccaggcttcccaaaagtgtttgttggcaattattcccctaggctgagcctgctcatgtacctctgattaataaatgcttatgaaatgatcctggtctcagagaaactggttatttccttaaaacctcagtgtcctctccccacaaaacagaattcactaattaaacttgtcatttcattactcattgcctgcctgcagtggtgagacagatgaagaagacaaggcagtcgataaaaatccatttgttggccatcttctgagtgcccactgagacacagtcccacctttggccgtgtgaatgccaccatgtcctggacccaagggaggctcgggtacacacatccatgtatttattcatctacttcgtaattcatttagtcggtcacgtagccactcattgaacctgggcccctccatctctccaaacagcatgttttcttcaagtaacatact

SEQ ID NO: 366 - DNA, 264 bp, Artificial
  Synthetic oligonucleotide
gggtctcccacttgtccagacagcggccgggcttgtcacggggctctgtgcagccttttccactctcccggctgccagcgtcccgccccgtcccctcccagcccccaagggaggaggggagagctgcagagaggaggaggggtcggggaggcccggctttataaaggcggctggaacaaccctgcccgccagaccccgtcgcccggatcccctgagctgcccgccatcccacgtgaccgcgccgccccccagctccaccgctga

SEQ ID NO: 367 - DNA, 156 bp, Artificial
  Synthetic oligonucleotide
ctatgatgggggctacatcaacgcctcagctgagggtgtgtccatccgcactggtctggagctctcccgggatcccgctggacggatgaaagtgtccaatgtctcctgccaggcctctgtctccagaatgcacgcggccttcgggggaaccttcaa

SEQ ID NO: 368 - DNA, 141 bp, Artificial
  Synthetic oligonucleotide
ctccccaaccgggcagtggagccccagctgcaggaggaagagcggatggtgtatgtggccttctctgagttcttcttcgactctgccatggagagctacttccgggcgggggccctgcagctgttgctggtgggggacaag

SEQ ID NO: 369 - DNA, 419 bp, Artificial
  Synthetic oligonucleotide
ctatcaattacagtccgtccaccacctccctgtgggctgtcctgagctctgttgggttcctgggatggaatcagtgcatcataaagggcattctttaagcagagaaggggccaggccaccccattcaggaactgctgcgggaataaagtgctaacttgcccccaggctgtctatgggagaccctgggcccagtctgggatgtacagggctctgggaagggggcagtcctggcggcagaacccggcctgcaggggcactttgcttagaagaggactctcctagcgggagaggctgggaggggctgcatcaggccgtggagctggttgctgtggtcatcagtatggctgcttgttcaggaagcgggagaacatggtgaaggcagcgaggggcttgtcggtgggaaccatgtggccggcgcc

SEQ ID NO: 370 - DNA, 232 bp, Artificial
  Synthetic oligonucleotide
gttcgtgagctcctgaccccaccattccctcctccccatataactgctcactcgggggcaattccttcatcccaaaccctttattcttcccagaaccctccccacccctctccaaaaaaacttgcccatacaggggccagatggtgacccatgacccagcctaaaaggcagccagagggaaaggacgggtgggtcctgctcctttgcctccggcccagttatctctcagcag

SEQ ID NO: 371 - DNA, 280 bp, Artificial
  Synthetic oligonucleotide
cttctggttgagggaatccacaaaccactcatcccccatgaaattgcaggccatgtctacatctccattatataataggatctggtatttctaaagcaggatggggtaaaaatgaggggtgtggaacaagcccagtccccagcccttccctagttcaaggcctacccctcaggaaattcaaggggccaagctagataacacgaaccagggaattttcatgttttctaacgacttactgcatgtccagtattctactaaatgttttatctgtgaaagtaga

SEQ ID NO: 372 - DNA, 73 bp, Artificial
  Synthetic oligonucleotide
gcccgctcgccatggccctcttcggggccctcttcctagcgctgctggcaggcgcacatgcagagttcccagg

SEQ ID NO: 373 - DNA, 18 bp, Artificial
  Synthetic oligonucleotide
ctgcaagatccgcgtcac

SEQ ID NO: 374 - DNA, 20 bp, Artificial
  Synthetic oligonucleotide
ctccaaggcgctggagctgg

SEQ ID NO: 375 - DNA, 8 bp, Artificial
  Synthetic oligonucleotide
tgaagcag

SEQ ID NO: 376 - DNA, 6 bp, Artificial
  Synthetic oligonucleotide
gagggg

SEQ ID NO: 377 - DNA, 35 bp, Artificial
  Synthetic oligonucleotide
ctgcgctttctggagcaagagctggagactatcac

SEQ ID NO: 378 - DNA, 51 bp, Artificial
  Synthetic oligonucleotide
cattccggacctgcggggcaaagaaggccacttctactacaacatctctga

SEQ ID NO: 379 - DNA, 92 bp, Artificial
  Synthetic oligonucleotide
gcctggacttgaaaggggagcagacaaatttcctgtcgttgggggaagttccctcttcttggccctggatctgaccctgaggcctcctgtag

SEQ ID NO: 380 - DNA, 16 bp, Artificial
  Synthetic oligonucleotide
ggtgaaggtcacagag

SEQ ID NO: 381 - DNA, 89 bp, Artificial
  Synthetic oligonucleotide
ctgcaactgacatcttccgagctcgatttccagccacagcaggagctgatgcttcaaatcaccaatgcctccttggggctgcgcttccg

SEQ ID NO: 382 - DNA, 24 bp, Artificial
  Synthetic oligonucleotide
gagacagctgctctactggttctt

SEQ ID NO: 383 - DNA, 52 bp, Artificial
  Synthetic oligonucleotide
gaaggtgtatgattttctctccacgttcatcacctcagggatgcgcttcctc

SEQ ID NO: 384 - DNA, 12 bp, Artificial
  Synthetic oligonucleotide
ctcaaccagcag

SEQ ID NO: 385 - DNA, 85 bp, Artificial
  Synthetic oligonucleotide
gtgtgggcagcgacaggtcgcagggtggcaagggtgggcatgctctcactttgagaaggccctgactctggctcccacctcgcag

SEQ ID NO: 386 - DNA, 64 bp, Artificial
  Synthetic oligonucleotide
atctgccctgtcctctaccacgcagggacggtcctgctcaactccctcctggacaccgtgcctg

SEQ ID NO: 387 - DNA, 7 bp, Artificial
  Synthetic oligonucleotide
tgcgcag

SEQ ID NO: 388 - DNA, 85 bp, Artificial
  Synthetic oligonucleotide
ttctgtggacgagcttgttggcattgactattccctcatgaaggatcctgtggcttccaccagcaacctggacatggacttccgg

SEQ ID NO: 389 - DNA, 36 bp, Artificial
  Synthetic oligonucleotide
ggggccttcttccccctgactgagaggaactggagc

SEQ ID NO: 390 - DNA, 45 bp, Artificial
  Synthetic oligonucleotide
gtgccccacgacctggacatgctgctgagggccacctactttggg

SEQ ID NO: 391 - DNA, 15 bp, Artificial
  Synthetic oligonucleotide
agcattgtcctgctg

SEQ ID NO: 392 - DNA, 30 bp, Artificial
  Synthetic oligonucleotide
agcccagcagtgattgactccccattgaag

SEQ ID NO: 393 - DNA, 87 bp, Artificial
  Synthetic oligonucleotide
ctggagctgcgggtcctggccccaccgcgctgcaccatcaagccctctggcaccaccatctctgtcactgctagcgtcaccattgcc

SEQ ID NO: 394 - DNA, 30 bp, Artificial
  Synthetic oligonucleotide
ctggtcccaccagaccagcctgaggtccag

SEQ ID NO: 395 - DNA, 18 bp, Artificial
  Synthetic oligonucleotide
ctgtccagcatgactatg

SEQ ID NO: 396 - DNA, 27 bp, Artificial
  Synthetic oligonucleotide
gacgcccgtctcagcgccaagatggct

SEQ ID NO: 397 - DNA, 41 bp, Artificial
  Synthetic oligonucleotide
ctccgggggaaggccctgcgcacgcagctggacctgcgcag

SEQ ID NO: 398 - DNA, 43 bp, Artificial
  Synthetic oligonucleotide
gttccgaatctattccaaccattctgcactggagtcgctggct

SEQ ID NO: 399 - DNA, 15 bp, Artificial
  Synthetic oligonucleotide
ctgatcccattacag

SEQ ID NO: 400 - DNA, 49 bp, Artificial
  Synthetic oligonucleotide
gcccctctgaagaccatgctgcagattggggtgatgcccatgctcaatg

SEQ ID NO: 401 - DNA, 83 bp, Artificial
  Synthetic oligonucleotide
gtaaggctggggtgtgaggatggaggaagaaaggaggggtgaactgggcgggcccagactgagcggggtgctcccacccacag

SEQ ID NO: 402 - DNA, 41 bp, Artificial
  Synthetic oligonucleotide
agcggacctggcgtggggtgcagatcccactacctgagggc

SEQ ID NO: 403 - DNA, 36 bp, Artificial
  Synthetic oligonucleotide
atcaactttgtgcatgaggtggtgacgaaccatgcg

SEQ ID NO: 404 - DNA, 24 bp, Artificial
  Synthetic oligonucleotide
ggattcctcaccatcggggctgat

SEQ ID NO: 405 - DNA, 36 bp, Artificial
  Synthetic oligonucleotide
ctccactttgccaaagggctgcgagaggtgattgag

SEQ ID NO: 406 - DNA, 23 bp, Artificial
  Synthetic oligonucleotide
aagaaccggcctgctgatgtcag

SEQ ID NO: 407 - DNA, 9 bp, Artificial
  Synthetic oligonucleotide
ggcgtccac

SEQ ID NO: 408 - DNA, 23 bp, Artificial
  Synthetic oligonucleotide
tgcccccacaccgtccacagcag

SEQ ID NO: 409 - DNA, 24 bp, Artificial
  Synthetic oligonucleotide
ctgtctgagccctcaatccccaag

SEQ ID NO: 410 - DNA, 7 bp, Artificial
  Synthetic oligonucleotide
ctggcag

SEQ ID NO: 411 - DNA, 20 bp, Artificial
  Synthetic oligonucleotide
ctgtcattcaggaccccaac

SEQ ID NO: 412 - DNA, 90 bp, Artificial
  Synthetic oligonucleotide
ccctctcagcccctcttttcccacattcatagcctgtagtgccccctctaacccccagtgccacagagaagacgggatttgaagctgtac

SEQ ID NO: 413 - DNA, 22 bp, Artificial
  Synthetic oligonucleotide
ccaatttaattccataatcaat

SEQ ID NO: 414 - DNA, 12 bp, Artificial
  Synthetic oligonucleotide
ctgaggagcaat

SEQ ID NO: 415 - DNA, 13 bp, Artificial
  Synthetic oligonucleotide
gcccagtccctac

SEQ ID NO: 416 - DNA, 105 bp, Artificial
  Synthetic oligonucleotide
cttgatcgtgagaaaggcgatgtgggagaactccttcacgaagccggcaatctgctccccgctgtccccgtacttcactaaccagggccggcgctgcacctccat

SEQ ID NO: 417 - DNA, 108 bp, Artificial
  Synthetic oligonucleotide
ctgccccaccaggaaagacatcagcctacagcagctgcatccttgctcacagctaccagcaagaccttagggctgggaattcctccacacttgccctctgtgggccag

SEQ ID NO: 418 - DNA, 90 bp, Artificial
  Synthetic oligonucleotide
agccaggcagccagctggccactcccaggcatacccgctcccaatcctccacagcagcccctatcccagggccaggaatctctaccttac

SEQ ID NO: 419 - DNA, 226 bp, Artificial
  Synthetic oligonucleotide
gtgagagcgaggcaacctttccagagggtcaggacagagattacctgggttctccgctggaaaagagcgaaattccaacttttggagaggactggggtcagaggtcatggtccccatgtgattctccgaggatcctgagggtcgtggtttatggagatgccttcaggaccgaggggcggcgtgtctggccagatgggatctctgctcaccctcttctttccttcag

SEQ ID NO: 420 - DNA, 374 bp, Artificial
  Synthetic oligonucleotide
gtgagaaacctcttctgcccaccctgggccagccagatgaccaatccctcacgacatgcaatgtcgggaggacttcctttgggcctgcccgcactgttagctcccgactctgtaggccagacctgacagggcccaggctgctgaccatcatccccatgttaccaccttttcctatgcatctcacaggccccattcttgggaatctcccctgcccactctcagccctacctctcagtctgcatagagatggctattctgctggctccgattctcatgactctcccctccattcaggggcctagtcttgcattcctgttctcttgggttttcttaccagtgacacctcagccttctgaggacttatttcttggtag

SEQ ID NO: 421 - DNA, 132 bp, Artificial
  Synthetic oligonucleotide
gtgaggggttcagggtgacatgggtgctctgaggctattaggatgtggttgctgtagatccagagcttagtagaaagaactggttgggacctagaggcctgactttccccgttttctctcctggttctacag

SEQ ID NO: 422 - DNA, 149 bp, Artificial
  Synthetic oligonucleotide
gtaagcagatctgagccagagttagggtttgaagacacaaacctgacactcttaatcttttctgaaggtcaagatcagtcccaggcccttctcagtgtaggcccttgataggtaggttgaggctgtggggcttacacctctttttccag

SEQ ID NO: 423 - DNA, 144 bp, Artificial
  Synthetic oligonucleotide
gtgggggccaaggaggggtgggaaaagggcctcagggctccagtaccaggaggatccagacttccctcctgttatgatgggtagagttgcatgtctgtatcagtctcccttggcttgttgattgggattgttgtgggcttccag

SEQ ID NO: 424 - DNA, 145 bp, Artificial
  Synthetic oligonucleotide
gtggaggcagagcggcggaaacgggccacagttctagagtctgaggggacccgagagtcggccatcaatgtggcagaagggaagaaacaggcccagatcctggcctccgaagcagaaaaggctgaacagataaatcaggcagcag

SEQ ID NO: 425 - DNA, 123 bp, Artificial
  Synthetic oligonucleotide
gtcaggagagggtagaggctgagggaggagcaaggcatgggcctttgaagattggtgctggggcaggatctttggggtactttgacttcatgggtcaagcaagctctgtcccttctcttgcag

SEQ ID NO: 426 - DNA, 205 bp, Artificial
  Synthetic oligonucleotide
gtgagaggcccctgggtgggaatggggacaggaattgacagtggaaggggttctcttatctacgcttgaggagagttccgcctctgtgggctctgttgagccagattacatggtcctttttattgtgaactgctttcttcattccccatcccccccttcttctccgtatcggtgatctctgatttttatccccctgtgatcacag

SEQ ID NO: 427 - DNA, 129 bp, Artificial
  Synthetic oligonucleotide
aatggagatgcagcagcttcactgactgtggccgagcagtatgtcagcgcgttctccaaactggccaaggactccaacactatcctactgccctccaaccctggcgatgtcaccagcatggtggctcag

SEQ ID NO: 428 - DNA, 420 bp, Artificial
  Synthetic oligonucleotide
gttagagctctctgaggacccagcacagagcactggtgccagggaccaaactgagaccccaccaccgtcatcaacacttacataccataaaggtcttcagagtgccttggccctagacctcccttcgttctttgtagagatggaatctaagaatgaaacatctccactcagtcctgcaaatatggaagttcttgagatacctttttttggtagatacttgtgctggtattctgagagtcactttactctgatggtttgcaagattcctaaaatcaactccagagcttacaagacaggtttgagagagggagaaaggaaaaccaacttactggcccccatgccatcttttcccgtttagccattggtaggctgggctgcacctctgtcaagtgtcctcatggtattctctctgttcctctc

SEQ ID NO: 429 - DNA, 120 bp, Artificial
  Synthetic oligonucleotide
tccagactcactctccagtgggagcagcagagatgtccagggtacagatgcaagtcttgatgaggaacttgatcgagtcaagatgagttagtggagctgggcttggccagggagtctggg

SEQ ID NO: 430 - DNA, 230 bp, Artificial
  Synthetic oligonucleotide
gacaaggaagcagattttcctgattctggctctagcttccctgccaagattttggtttttatttttttatttgaactttagtcgtgtaataaactcaccagtggcaaaccaaaaaaaaaaatctttgattggggaatgaagttgggaaagtcactagcattttccttggatccagtcctgtcagcatgatgcctccatgaataagagtgaacttcttgtaaagtgaaact

SEQ ID NO: 431 - DNA, 41 bp, Artificial
  Synthetic oligonucleotide
agtacatccgggggagcggaactgcaagaggaaaggctcgg

SEQ ID NO: 432 - DNA, 69 bp, Artificial
  Synthetic oligonucleotide
gtaggcttctgggagcgaccgctccgctcgtctcgttggttccggaggtcgctgcggcggtgggaaatg

SEQ ID NO: 433 - DNA, 42 bp, Artificial
  Synthetic oligonucleotide
ctggcgcgcgcggcgcggggcactggggcccttttgctgagg

SEQ ID NO: 434 - DNA, 33 bp, Artificial
  Synthetic oligonucleotide
ggctctctactggcttctggccgcgctccgcgc

SEQ ID NO: 435 - DNA, 105 bp, Artificial
  Synthetic oligonucleotide
cgcgcctcctctggattgccccgaaacaccgtggtactgttcgtgccgcagcaggaggcctgggtggtggagcgaatgggccgattccaccggatcctggagcct

SEQ ID NO: 436 - DNA, 117 bp, Artificial
  Synthetic oligonucleotide
gagctgctgcttttctgggcatgttccatgtgttgactccctacatactccaggactagcttaggtcccaacccaatagttcccagccttctgaggacccatgactcctctttccag

SEQ ID NO: 437 - DNA, 100 bp, Artificial
  Synthetic oligonucleotide
ggtttgaacatcctcatccctgtgttagaccggatccgatatgtgcagagtctcaaggaaattgtcatcaacgtgcctgagcagtcggctgtgactctcg

SEQ ID NO: 438 - DNA, 59 bp, Artificial
  Synthetic oligonucleotide
acaatgtaactctgcaaatcgatggagtcctttacctgcgcatcatggacccttacaag

SEQ ID NO: 439 - DNA, 33 bp, Artificial
  Synthetic oligonucleotide
gcaagctacggtgtggaggaccctgagtatgcc

SEQ ID NO: 440 - DNA, 13 bp, Artificial
  Synthetic oligonucleotide
gtcacccagctag

SEQ ID NO: 441 - DNA, 16 bp, Artificial
  Synthetic oligonucleotide
ctcaaacaaccatgag

SEQ ID NO: 442 - DNA, 22 bp, Artificial
  Synthetic oligonucleotide
atcagagctcggcaaactctct

SEQ ID NO: 443 - DNA, 18 bp, Artificial
  Synthetic oligonucleotide
ctggacaaagtcttccgg

SEQ ID NO: 444 - DNA, 31 bp, Artificial
  Synthetic oligonucleotide
gaacgggagtccctgaatgccagcattgtgg

SEQ ID NO: 445 - DNA, 5 bp, Artificial
  Synthetic oligonucleotide
atgcc

SEQ ID NO: 446 - DNA, 99 bp, Artificial
  Synthetic oligonucleotide
atcaaccaagctgctgactgctggggtatccgctgcctccgttatgagatcaaggatatccatgtgccaccccgggtgaaagagtctatgcagatgcag

SEQ ID NO: 447 - DNA, 80 bp, Artificial
  Synthetic oligonucleotide
gagaggccagtgcagttctggcgaaggccaaggctaaagctgaagctattcgaatcctggctgcagctctgacacaacat

SEQ ID NO: 448 - DNA, 5 bp, Artificial
  Synthetic oligonucleotide
ctcag

SEQ ID NO: 449 - DNA, 47 bp, Artificial
  Synthetic oligonucleotide
gccatgggtgtatatggagccctcaccaaagccccagtgccagggac

SEQ ID NO: 450 - DNA, 153 bp, Artificial
  Synthetic oligonucleotide
acactaaaagaacaaacaccttgctcttcgagatgagacattttgccaagcagttgaccacttagttctcaagaagcaactatctctttcatgtgccttctgaggaagtattcagagggggaatatcaaatgtctttcccttggactctccca

SEQ ID NO: 451 - DNA, 744 bp, Artificial
  Synthetic oligonucleotide
ggtctcactgtgtcacgaggctggagtgcagtggaacaatttcagcacactgcaacctctgcctcccaggctcaaatgatcatcccacctaagcctccggagtagctgggaccacaggcaagcgccaccatgcccagctgataccaatgtcttttaaaaaatgttgtatgtggaaataaattgagacttatagaaaagctgcaaaaatagtgcagtttctatatatccttcccccatctttggctagtgttaacaatctacataaccgcagtacgatgatcaaggctaggaaattaacattggcacagtactgttaatgaaaccatgctttgttttgagattcccacagttttgcctttttctgttccaagatcctatccaggatcccacgttgcatttcattgtcatgtctccttctcctctaacctctgacaatgcatcattctttccatgtcttttgtgatgttgacacttttgaagaggactggtccagatttttgtacactgtccctcagtttgggattgtctgctgttttctcatgaacagatagaggttttgcatttttgacaagaatcctcagaagagatgcacccttctcagtgcactgtagcaaggggcgcatgctgtcaatgtcttactggtgatgttaactttgatcgcttttgattcagatagtatctgctgggtttttccactgtaaagttactattttttccattgtaattaataaataacttgaggga

SEQ ID NO: 452 - DNA, 174 bp, Artificial
  Synthetic oligonucleotide
gtaccagtccttctgctccccagggaaactgaactcagtttgcatcagctgctgcaacacccctctttgtaacgggccaaggcccaagaaaaggggaagttctgcctcggccctcaggccagggctccgcaccaccatcctgttcctcaaattagccctcttctcggcacactg

SEQ ID NO: 453 - DNA, 309 bp, Artificial
  Synthetic oligonucleotide
agaagaggaagacaggaagggggtggggatgtgaagcgaccgtcccagccttccccgcccgccacccccaccccaactcggcagccgtcacgtgatgcctggagtgggaggtggggagaaaaggcgagacttttgtgggtgctcccgatcgccagtagttccttcagtctcagccgccaactccggaggcgcggtgctcggcccgggagcgcgagcgggaggagcagagacccgcagccgggagcccgagcgcgggcgatgcaggctccgcgagcggcacctgcggctcctctaagctacgaccgtcgt

SEQ ID NO: 454 - DNA, 487 bp, Artificial
  Synthetic oligonucleotide
gtgagtttcttctgggtgtccttttattctgggtagggagcgggagtccgtgttctcttttgttcctgtgcaaataatgaaagagctcggtaaagcattctgaataaattcagcctgactgaattttcagtatgtacttgaaggaaggaggtggagtgaaagttcacccccatgtctgtgtaaccggagtcaaggccaggctggcagagtcagtccttagaagtcactgaggtgggcatctgccttttgtaaagcctccagtgtccattccatccctgatgggggcatagtttgagactgcagagtgagagtgacgttttcttagggctggagggccagttcccactcaaggctccctcgcttgacattcaaacttcatgctcctgaaaaccattctctgcagcagaattggctggtttcgcgcctgagttgggctctagtgactcgagactcaatgactgggacttagactggggctcggcctcgc

SEQ ID NO: 455 - DNA, 418 bp, Artificial
  Synthetic oligonucleotide
ggagagacagagaaaagaaaaacacagcatgagaacacagtaaataaataaaaccataaaatatttagcccctctgttctgtgcttactggccaggaaatggtaccaatttttcagtgttggacttgacagcttcttttgccacaagcaagagagaatttaacactgtttcaaacccgggggagttggctgtgttaaagaaagaccattaaatgctttagacagtgtatttataccagttgatgtctgttaattttaaaaaaatgttttcattggtgtttgtttgcgtatccagaaagcagttcatgttatccataaatctggttttgtctttttttgttttaaagaaaaagatgtatacatacagtatagctgcattagataaagcagtgtttgtattttaaaggatgtctgcacaa

SEQ ID NO: 456 - DNA, 44 bp, Artificial
  Synthetic oligonucleotide
gctttgcgctgcaaatccagtgctaccagtgtgaagaattccag

SEQ ID NO: 457 - DNA, 94 bp, Artificial
  Synthetic oligonucleotide
ctgaacaacgactgctcctcccccgagttcattgtgaattgcacggtgaacgttcaagacatgtgtcagaaagaagtgatggagcaaagtgccg

SEQ ID NO: 458 - DNA, 4 bp, Artificial
  Synthetic oligonucleotide
acag

SEQ ID NO: 459 - DNA, 58 bp, Artificial
  Synthetic oligonucleotide
ggatcatgtaccgcaagtcctgtgcatcatcagcggcctgtctcatcgcctctgccgg

SEQ ID NO: 460 - DNA, 11 bp, Artificial
  Synthetic oligonucleotide
ctgaagctgaa

SEQ ID NO: 461 - DNA, 63 bp, Artificial
  Synthetic oligonucleotide
ggagatgccaccccctcctgcattgttcttccagccctcgcccccaaccccccacctccctga

SEQ ID NO: 462 - DNA, 30 bp, Artificial
  Synthetic oligonucleotide
tctgaaaagtgcttaagaaaatcttctcag

SEQ ID NO: 463 - DNA, 84 bp, Artificial
  Synthetic oligonucleotide
ttctccttgcagaggactggcgccgggacgcgaagagcaacgggcgctgcacaaagcgggcgctgtcggtggtggagtgcgcat

SEQ ID NO: 464 - DNA, 26 bp, Artificial
  Synthetic oligonucleotide
gtacgcgcaggcgcttctcgtggttg

SEQ ID NO: 465 - DNA, 113 bp, Artificial
  Synthetic oligonucleotide
gcgtgctgcagcgacaggcggcagcacagcacctgcacgaacacccgccgaaactgctgcgaggacaccgtgtacaggagcgggttgatgaccgagctgaggtagaaaaacgt

SEQ ID NO: 466 - DNA, 82 bp, Artificial
  Synthetic oligonucleotide
ctccgagaaggggaggaggatcatgtacgcccggaagtaggacctcgtccagtcgtgcttgggtttggccgcagccatgatc

SEQ ID NO: 467 - DNA, 24 bp, Artificial
  Synthetic oligonucleotide
ctccgaatctggttgggcatccag

SEQ ID NO: 468 - DNA, 28 bp, Artificial
  Synthetic oligonucleotide
catacggccaatgtcacaacaatcagcc

SEQ ID NO: 469 - DNA, 10 bp, Artificial
  Synthetic oligonucleotide
ctccgcggca

SEQ ID NO: 470 - DNA, 21 bp, Artificial
  Synthetic oligonucleotide
ctgggcagacacgagcaggag

SEQ ID NO: 471 - DNA, 52 bp, Artificial
  Synthetic oligonucleotide
gcagcgcgggccccagcagcctcggcagccacagccgctgcagccggggcag

SEQ ID NO: 472 - DNA, 43 bp, Artificial
  Synthetic oligonucleotide
cctccgctgctgtcgcctcctctgatgcgcttgccctctcccg

SEQ ID NO: 473 - DNA, 32 bp, Artificial
  Synthetic oligonucleotide
gccccgggactccgggagaatgtgggtcctag

SEQ ID NO: 474 - DNA, 39 bp, Artificial
  Synthetic oligonucleotide
gcatcgcggcaactttttgcggattgttcttgcttccag

SEQ ID NO: 475 - DNA, 34 bp, Artificial
  Synthetic oligonucleotide
gtgagaatacccagaggccagcagccgaggccag

SEQ ID NO: 476 - DNA, 161 bp, Artificial
  Synthetic oligonucleotide
cccggatgaagagtaacgccattaccgccggagccgccgagagccttagccgacggaaactggacactggaccggcagcgccatgagactcctcccccgcttgctgctgcttctcttactcgtgttccctgccactgtcttgttccgaggcggccccagag

SEQ ID NO: 477 - DNA, 150 bp, Artificial
  Synthetic oligonucleotide
gtaatacagaagtattagttttaattcagatgtaggcattttaaaacgatgagcttgttcatatatatctgaatacccatatctgtaaagtaatattgttggcatttaaagggaatacgtaggtgatatagacacaataaaaaataaacc

SEQ ID NO: 478 - DNA, 161 bp, Artificial
  Synthetic oligonucleotide
caacaagggtacagaagattttattgttgaatccttagatgcctcattccgttatcctcaggactaccagttttatatccagaatttcacagctcttcctctgaacactgtagtgccaccccagagacaggcaacttttgagtactctttcattcctgcag

SEQ ID NO: 479 - DNA, 193 bp, Artificial
  Synthetic oligonucleotide
gtaagatcctctaaaccttctttttgtttaagttagagatggatgggggcggtgacgttgtttaatagaatatatctgttcattcagttgcctgttttgtggttgaacctgtgatagccaccagggaagcaaagataaattgcacgtttcttcttcaagtctaatccagtgggggaggcatatgaaaacaggc

SEQ ID NO: 480 - DNA, 185 bp, Artificial
  Synthetic oligonucleotide
gtaaatgttcctttgtgcaacaattcggtctttacttaacctgccctaatatttttcggcctgatgggaattagtgcagagaagccatgtcaccatagaaggcaactcctacttgtgtgtggactgagcaatcagagtctgtggcgataatattgctgaaaatgcactgcattcatttttctaaa

SEQ ID NO: 481 - DNA, 409 bp, Artificial
  Synthetic oligonucleotide
gtaacaaatttggtttttttttaaaccattaaaatctatgtgtgtgcgtgtgtatgtatgtgagcagttggtcttaccagaatcattgttgaactacctgaaacaagtctttagaatactaaatataatgctgttgtctcttcctttttgacattttctgatttttttcccccaaaactcagttaatatttacccactatgattattgatgtcctgccttgaacagttttaaagaaaacaatttttggaatagctcaaatttcaattgatggcacaaatcagcattttgttgttgttactgtattacaattagtattctaaaggcagaagcagaagtagctgctttttagcaatagaattgtttcagtattttgctgctgtttaatgcgcatcttcagaaaacttccca

SEQ ID NO: 482 - DNA, 342 bp, Artificial
  Synthetic oligonucleotide
gtggcttcaaggaatttggggatctctctggcaacaaattgtgaaacatgaaatttctgctgactttaatatatgaaacctaatcctacccccttttttaacaaaaagaaactagtacatttgtgaaaattgtgttgtgttgtccattgttgctctagttctgacccagaggtagctctggagtgattttagacctactcactcagttgtgtgtaggtttttttgttttgttttgagagagaatttttctctccttaatagaagcatcctttttaaagagaagttgccttggtccacacactaagcagaaaaccaagttatcaggacagagatatttcccag

SEQ ID NO: 483 - DNA, 498 bp, Artificial
  Synthetic oligonucleotide
ttactcctaatcaatgaagaaagtgagttggatatttttaaagcagttaactaattttttcttacctaatcttttgggagttttgcttgttgatataacctttttagttaacctgaaagattccaaaaattgttcttaagtgcttgagactggaaccaaaattaaattgtacttcataaaatcctcttatagagttactcttgccctagattgtaaattaagtttggcattattgtcagactggatggagggtgaagtaaaatagtatgaacaattaagaggctctccccctcttgtctttaagccatattctcctacatgtattttataagaaaatgttaagtcaaattttagtggctctttaattcctgacctcttcattctccttttcagtataacctcccctatgctcatgcccacacagacaaaaaaacaaaacgaaatacacacagaaaaaagtctttccaaactgtttaagtatttaaacatctgagccaa

SEQ ID NO: 484 - DNA, 512 bp, Artificial
  Synthetic oligonucleotide
agcagatagaagttattgtataattgttaatcactttgcaaataggggctatcaaattacctatattggcattgctggattataaactctatatctgtaatataaagtgtttgagtttttaattgggctgttatgatcagtagttgattttgagaaagctctatgagctctaagtaactgcatggttttttgtttaatgtaatataggagacccttcacattcccaaggaatatattccaaaacatttttgtgaatatctaagtttgtgaaactactagggcatgatacagtaaggtgtaattacagaatttacgaaatgtaaatggcctctacagagttttatggaatacctggtactaacgtaggcagctgcaaaaccacactgagttacagctgtcagccctcctcattcctaaataacttgccttacatatcagccctcccacttctgaagttcaaattagtgcctcggaaatgtagaatttattatttgtcatttttttttttttag

SEQ ID NO: 485 - DNA, 748 bp, Artificial
  Synthetic oligonucleotide
atgtctttttaaaatgtaaatatttggatgaagtttttctttgttttgatatattcatttgctacaccaactatgttttcagaattcatcttttgaacaacttggtttcagaatatgtaaaatgactttaaggatcttgtgtatcaaacctatccccggatgtgtgagaataatgtgttcataaagcatggatctcgctttggttgtatagcttcctcatttacttcatggtcttacatagctggtgactttcagggctaatctgccctctaaagcattgtcccaggagaggaaaaggaaatgggacctcagaagtagaagcctcagggaaggagtaaagtagaaatcagaagaaaagaagcttcacttgatagtaataaggtttttaacttcaagtaccttcagaaaatgtgattttgataagaggaaagggcaaatttagaccttaaaaaatatggaagaactactgccttaaaagtgcatttgtagcacatcagcctagaactgtatcatggctgtgctggggagaagtaaatggtggtaatgtaacattgccacctttacttaatgatgtgttattttcgaggtacagtagatcaatatagtaataggcgagcctcatatatagcattcatcttgtacaatgatatccatacccttgatatgaaggaaaattgacttggtttgtgcatttgaatactgaaataattttttaaaactcagtgacacataccatctcttgccaaga

SEQ ID NO: 486 - DNA, 370 bp, Artificial
  Synthetic oligonucleotide
ctagaccctgtattttagttcctaaattagatgtttaaatttaaaaacattttcagatgtacttaagtacttccatagtacttttttttttttttttttttttgccccctgagacggagtctctgtgtcacccaggctggagtgcagtggtgcgatctcggctcactgcaacttctgcctcttgggttcaagcagttctccctgtctcagcctcctgagtagcttggattacaggcgcccgtcaccgcacctgcctaatttttgcatttttagtagagacggggtttcgtcatttggccaggctggtcttgaactcctgaccacaggtgatacgcctgccttggcctcccaaagtgtgctgggattacag

SEQ ID NO: 487 - DNA, 986 bp, Artificial
  Synthetic oligonucleotide
gcgtgagccactgtgcccggcccactgttcactttttgaatggcatcattttatagctgtagaactaaaatcaatgtttgccccaattttcttaagtaaaactctactttgagctcttacctccaacttagtaaaaagcagcttcacacacaaacaagattcttactggtggaatgttaggtttcgttgttaagttaatctgtctataagctcatccttagaggatatttgaggaggaagaacaccttgcagctgacttgcaaacatctaaataatttatttcgggtgcttatgaatgttactaatggattttgtatgaatttttatcccttttcatttatacaaaaacctgggcttttatgttaattatatcatctgaggttctaaggttttttttttagattttgaaatttagggataatagctcttaggtttgggtaccactttgctgcagtttaagaaagggggaagggaactcatttattaaacatcaatcacgtgctgtgttctgtttgttttctagtcatcatatcacacacctttacgacagctcactgaaggaaggtgatactgttcccattttgtagatggaatagacaaaacctgaatttaagtagcttgctcaaggttccatattgaatatggaaagttcaaatcatctcagtaatgaatataccatatatacttgctgtattgtatctatgataattcagttacccacaatacccttttaaatttctgttaatgacatacctttaaatgtctccttgatgaacagaatcatggtctttaaaaacattttcatgggttgattgcattttcaagctctaaaggattgaaagataaatcttcacgttaaaggtgagagtgaagtatctgctcttgggttacagaaccagatagtactagaactaagattacagggtaaagctgcttttatcttttttctttttctttttcttttttttttgacatggggtctcact

SEQ ID NO: 488 - DNA, 951 bp, Artificial
  Synthetic oligonucleotide
gtattgcccaggctggaatgcagtggcatgatctcagctcacggcagcctctgcctcttgggctcaagcgattctcctgcttcagctttccaagtatttgggaccacaggcgcacaccacaggcctggctaatgtttttgttttgtttttggtagagacggggtttcaccatgttgccaggctggtctcgaactcctgagctcaagtgattcacccaccttggcctcacaaagtgtcaggcttacaggcgtgagccactgcgcccggctcacagggtaaggcttctgtctggtgtgttgtattacggattttgcttaataggcacagtgaggcattaaaaagaaaattcagtatgcctgtagaaaggataatccttgtttaaagtctccaaattgcagtcaaagatgttttgactgtgcctttttttgttcccctgctgtcccttatgtagacttctgtcagtacccatggcagcctgtcatcttgttgacatctccttctggactgtgagctctgtatctggcttgtttttcatccccagcttctagttcacaattaggtagaaccctattactctttgaagaaggaacaagaaaatgtgggccagttttcatttgccattcttccatgtgagttagtatggttcgtaagtattcctggtgatacgctagtattggcaattctgtgaggttgaacaaaggggtggtatggtgtgctagcgtgggaattaggagacctctgggtcttgacagtgccctggccactaagcaaaggcagttcatccttggagtctcaatgtgcttttttgttaattgagatatgcttgaagtatcagccctaaatagtctgattctgtgacctacaaacccttacttaattcagtgttactataaatgattcttcccttaaacctactttttacttagcaaaagagaaaaaaaaaaaaaggaa

SEQ ID NO: 489 - DNA, 186 bp, Artificial
  Synthetic oligonucleotide
acgctcatgtcaggctgcctgggtttgaaccccagatcccctcttagttggaggcaagttgtatgatgcttcagcttttggttcctgcctcctaaggttgttaggagttactgtgtgtagctgcttagaacattgcctgggtctcagtaagccgcttaagtgactgctctcattttcgctgtaaag

SEQ ID NO: 490 - DNA, 1223 bp, Artificial
  Synthetic oligonucleotide
caccatactgtaataacatcccatgaagcatggggcggggaagagtatatggtaccttatggactttgatgtggtggggtagtaggtaaattctgaatatgtaagctacatagtattctttttgtaactaaaggataaaagttttaagatgggcatgtaatatggctagcactggattttaatgatgagccagagtaataaggctggcaaggggagtttttgttttgtaataaatctcttacacctgcacatccagttctttttaaaaacacgtttgaagaggctccatatttctcagtgaagctgttggggttcatgttatttttgaaaatcatcttgcaatttatttcagcatcagactgaaccacccaaagaaaattagtctatttctgaacagttttttcagaaaccatattggtctgatcacccaacatttatagaaataggcgcttaaggcctagaggcatttcagaaaggagaatgagaaatactgtggtcaagagtagtgttcagatggagaacatcaagcatctgctctgcccttccacacacatcctcatttcatcttcacaactgccctaggtaaccttgttatctgtaatgaaacagcctcaaggagcacagaggcactcactcctcacgtttggtctgttgccatttccggcttggttggaatagggtaggagccttttggcagggagcacattctcagtaatgcagagtgcactcacctgggttctagcttcaacacttaggatttgcttgatattttgtattctctgaggcactgcctgtatttgtttctgctatcacagtccagagtcaagcttcatttataaagactgggcagggcatggtggctcactcctgtaattccagcactttgggaggctgaggtgggtggatcactttaggtcaggagttcaagaccagcctggccaacatggtgaaaccccatctctactaaaaaatacaaaaaggccgggcacggtggctcacacctgtaatcccaacactttgggaggccaaggtgggcagaacacctgaggtcaggagttcaagaccatcctggcgaacatagtgaaacctcgcctctactaaaaatacaaaaattagccaggtgtggtggtgcatgcctgtaatcccagctacttgggaggctgaggcaggagaattgcttaaacctgggaggtggagattgtggtgagctgagatcgtgccac

SEQ ID NO: 491 - DNA, 2249 bp, Artificial
  Synthetic oligonucleotide
tgcactccagcctgggagatagaacgagactccatctcaaaaaagaacaaaaacaattagccgagcgaggtggtgcacgcctgtaatcccagctactcatgaggctgaggcaggagaatcacttgaacccaggaggaggaggttgtagtgagtcaaggttgcaccactgcactccagcctgggtgacagagtgagactgtctcaaaaaataagtacataaataataagtaaaagctactaacaattaaaaaataaataaataaagacaagactgtctggaaaatggctctcctaaaaggaccagttgccatcatccacagtggaagattcaaagcagttggtccttggtacgtatgagaagcggatttcattcccttgaattctacagagcagtttattagagtgaatgcattttaaggccttgcatttgatatgtcatccagttcataatcaagttgcctttttctggctaaaacataatgattatgtatttttctcatttggtcctacaagctgctggccctttgtccctccactgtgggaatcagatctagagcaggctgagcctgcagacacagcagtggccaaaaggtcactctaagtgttttgtcttgactccttacttgaagtccacccagctagcacacatctggtttatactgaagccccctgcctagaaatactcatttcaggaaccaccagtaagcatctgtgaccacacaggctttttgactgatggcttcccggatctggtttcaagggataaccccgtctgtgtgcatctatggtcttctctctacagcgaggactttgcagtgctgcttgtggtccacacaaggggctcagagctgagtctgaactgcttcatggtcaccagctcctgtcccttccagtcttgagaggcttttttctccagatggaacctttccttcccgccgttttctcggtctctggctgtttttctcttgtgcccgtctaattggacacctcctggcttccatctctgtggttctcctgcctcacttcctgttctgttgtttttccgttttgtcaaaatatctcctatgttcttggcttccttttcgtcgccaggttttcagctttcctttagctcttcttctaatatggcttctgcccacaaaagcctgctctgtcaggatctcatggttctccacttgccagaaccttcttcagcctcagttcctcggcctcaacttgtacgtttaacccattgaccaccaccccccaaattcaccttcatttctttgaccctgctcctcactccttttctgttgaggaatctgttgactaactccaggctcactcaggctcaccgtcctgctctctgcaccagcctttccagagcgtgccagttctcatggcttcatctgttaactgttgatcgcttcagtcctgatttttagacctaaatggtttccttaacgccattctaactgcctgtgactcattttcacttacagtgtttattgtaacgccaaaccaacaaatcacaggtgcttgcttctctccataaatctccccagtctaactttttgtcattcaacatgactcgtttatccaacctgaaatcgcatatagccccaagtatggtgttttgtacacaggtatttaataagtgacttccagttttggctctgctatgaataaaaagagatttcagttctcttcactttgaaatctaacaactcagagaacattgaagaaattggaatttagttgggatgaaatacttgtggtttaaaatatttctgttcatattttctaatttgttgccggaggtcttgggttttctatttgagtgcttgcaaactcaatgtgatttctgtcagcatatcttaggtttgtttgttatgaaacttatgcagtgtgaggttctatctgaaaatgttatttagctatcttctgggactatttaatgaaagtggggtcatgaatccttaaaattcttgtgcagctttgagaaacatttctgttatttgggtatcagtttgtaagtgtggtaaagccaagatggaaacgagcactttgctttcttggttgttgttactggtctaacctcctgcttgaactagtctgctgtcctgtcaaatgcatctttttatttacatgtcccttaaattaaagctgatcatgaaagtatttgtgtgcaacatgaaatgttttctaaagtaccagtgcatattcctgcttggtctcaagacgcacgaggaatccaaaatagaagcaaa

SEQ ID NO: 492 - DNA, 117 bp, Artificial
  Synthetic oligonucleotide
ggcctgctctccccacctctccgcgctgagcagccacgtcggcggcggtccctggtccagggaggggcgtggcaaaggcccgtgcgcggtacgtgtcccgcccctcgctgcccggag

SEQ ID NO: 493 - DNA, 113 bp, Artificial
  Synthetic oligonucleotide
gcttgttagcagtggcacaagatcttacagaggatgaagaaacagtagaagattccataattgaggatgaagatgatgaagccgaggtagaagaagatgaacccacagatttg

SEQ ID NO: 494 - DNA, 4 bp, Artificial
  Synthetic oligonucleotide
gtag

SEQ ID NO: 495 - DNA, 73 bp, Artificial
  Synthetic oligonucleotide
aagataaagaggaagaagatgtgtctggtgaacctgaagcttcaccgagtgcagatacaactatactgtttgt

SEQ ID NO: 496 - DNA, 5 bp, Artificial
  Synthetic oligonucleotide
aaaag

SEQ ID NO: 497 - DNA, 6 bp, Artificial
  Synthetic oligonucleotide
gagaag

SEQ ID NO: 498 - DNA, 43 bp, Artificial
  Synthetic oligonucleotide
attttccagcaaataacattgtgaagttcctggtaggctttac

SEQ ID NO: 499 - DNA, 59 bp, Artificial
  Synthetic oligonucleotide
agcccatgggcggacgaccatttggtttggtcatcaatctgaactacaaagatttgaac

SEQ ID NO: 500 - DNA, 77 bp, Artificial
  Synthetic oligonucleotide
ggcaatgtattccaagatgcagtcttcaatcaaacagttacagttattgaaagagaggatgggttagatggagaaac

SEQ ID NO: 501 - DNA, 94 bp, Artificial
  Synthetic oligonucleotide
cgtaagagacccatacagaaagtagaaatgggtacatcaagtcagaatgatgttgacatgagttggattcctcaggaaacattgaatcaaatca

SEQ ID NO: 502 - DNA, 64 bp, Artificial
  Synthetic oligonucleotide
ataaagcttcaccaagaaggttgcccaggaaacgggcacagaagagatcagtgggatctgatga

SEQ ID NO: 503 - DNA, 61 bp, Artificial
  Synthetic oligonucleotide
catagattgagaacagttgaactcttaaatcctcagatgccaggggtctgctctagcatca

SEQ ID NO: 504 - DNA, 94 bp, Artificial
  Synthetic oligonucleotide
gtaagtatttagcagaaactaactccgtaatgaatggaattcaattccacacatggtttgttcaagcacacttaataagtagcctattttttaa

SEQ ID NO: 505 - DNA, 2359 bp, Homo sapiens
caagcccagcagccccggggcggatggctccggccgcctggctccgcagcgcggccgcgcgcgccctcctgcccccgatgctgctgctgctgctccagccgccgccgctgctggcccgggctctgccgccggacgtccaccacctccatgccgagaggagggggccacagccctggcatgcagccctgcccagtagcccggcacctgcccctgccacgcaggaagccccccggcctgccagcagcctcaggcctccccgctgtggcgtgcccgacccatctgatgggctgagtgcccgcaaccgacagaagaggttcgtgctttctggcgggcgctgggagaagacggacctcacctacaggatccttcggttcccatggcagttggtgcaggagcaggtgcggcagacgatggcagaggccctaaaggtatggagcgatgtgacgccactcacctttactgaggtgcacgagggccgtgctgacatcatgatcgacttcgccaggtactggcatggggacgacctgccgtttgatgggcctgggggcatcctggcccatgccttcttccccaagactcaccgagaaggggatgtccacttcgactatgatgagacctggactatcggggatgaccagggcacagacctgctgcaggtggcagcccatgaatttggccacgtgctggggctgcagcacacaacagcagccaaggccctgatgtccgccttctacacctttcgctacccactgagtctcagcccagatgactgcaggggcgttcaacacctatatggccagccctggcccactgtcacctccaggaccccagccctgggcccccaggctgggatagacaccaatgagattgcaccgctggaggtgaggccctgcctgccagtccccctactcctctgctggccactgtgactgcagcatatgccctcagcatgtgtccctctctcccaccccagccagacgccccgccagatgcctgtgaggcctcctttgacgcggtctccaccatccgaggcgagctctttttcttcaaagcgggctttgtgtggcgcctccgtgggggccagctgcagcccggctacccagcattggcctctcgccactggcagggactgcccagccctgtggacgctgccttcgaggatgcccagggccacatttggttcttccaaggtgctcagtactgggtgtacgacggtgaaaagccagtcctgggccccgcacccctcaccgagctgggcctggtgaggttcccggtccatgctgccttggtctggggtcccgagaagaacaagatctacttcttccgaggcagggactactggcgtttccaccccagcacccggcgtgtagacagtcccgtgccccgcagggccactgactggagaggggtgccctctgagatcgacgctgccttccaggatgctgatggctatgcctacttcctgcgcggccgcctctactggaagtttgaccctgtgaaggtgaaggctctggaaggcttcccccgtctcgtgggtcctgacttctttggctgtgccgagcctgccaacactttcctctgaccatggcttggatgccctcaggggtgctgacccctgccaggccacgaatatcaggctagagacccatggccatctttgtggctgtgggcaccaggcatgggactgagcccatgtctcctcagggggatggggtggggtacaaccaccatgacaactgccgggagggccacgcaggtcgtggtcacctgccagcgactgtctcagactgggcagggaggctttggcatgacttaagaggaagggcagtcttgggcccgctatgcaggtcctggcaaacctggctgccctgtctccatccctgtccctcagggtagcaccatggcaggactgggggaactggagtgtccttgctgtatccctgttgtgaggttccttccaggggctggcactgaagcaagggtgctggggccccatggccttcagccctggctgagcaactgggctgtagggcagggccacttcctgaggtcaggtcttggtaggtgcctgcatctgtctgccttctggctgacaatcctggaaatctgttctccagaatccaggccaaaaagttcacagtcaaatggggaggggtattcttcatgcaggagaccccaggccctggaggctgcaacatacctcaatcctgtcccaggccggatcctcctgaagcccttttcgcagcactgctatcctccaaagccattgtaaatgtgtgtacagtgtgtataaaccttcttcttcttttttttttttaaactgaggattgtcattaaacacagttgttttctacctgcc

SEQ ID NO: 506 - DNA, 2077 bp, Homo sapiens
caagcccagcagccccggggcggatggctccggccgcctggctccgcagcgcggccgcgcgcgccctcctgcccccgatgctgctgctgctgctccagccgccgccgctgctggcccgggctctgccgccggacgtccaccacctccatgccgagaggagggggccacagccctggcatgcagccctgcccagtagcccggcacctgcccctgccacgcaggaagccccccggcctgccagcagcctcaggcctccccgctgtggcgtgcccgacccatctgatgggctgagtgcccgcaaccgacagaagaggatccttcggttcccatggcagttggtgcaggagcaggtgcggcagacgatggcagaggccctaaaggtatggagcgatgtgacgccactcacctttactgaggtgcacgagggccgtgctgacatcatgatcgacttcgccaggtactggcatggggacgacctgccgtttgatgggcctgggggcatcctggcccatgccttcttccccaagactcaccgagaaggggatgtccacttcgactatgatgagacctggactatcggggatgaccagggcacagacctgctgcaggtggcagcccatgaatttggccacgtgctggggctgcagcacacaacagcagccaaggccctgatgtccgccttctacacctttcgctacccactgagtctcagcccagatgactgcaggggcgttcaacacctatatggccagccctggcccactgtcacctccaggaccccagccctgggcccccaggctgggatagacaccaatgagattgcaccgctggagccagacgccccgccagatgcctgtgaggcctcctttgacgcggtctccaccatccgaggcgagctctttttcttcaaagcgggctttgtgtggcgcctccgtgggggccagctgcagcccggctacccagcattggcctctcgccactggcagggactgcccagccctgtggacgctgccttcgaggatgcccagggccacatttggttcttccaagggactactggcgtttccaccccagcacccggcgtgtagacagtcccgtgccccgcagggccactgactggagaggggtgccctctgagatcgacgctgccttccaggatgctgatggctatgcctacttcctgcgcggccgcctctactggaagtttgaccctgtgaaggtgaaggctctggaaggcttcccccgtctcgtgggtcctgacttctttggctgtgccgagcctgccaacactttcctctgaccatggcttggatgccctcaggggtgctgacccctgccaggccacgaatatcaggctagagacccatggccatctttgtggctgtgggcaccaggcatgggactgagcccatgtctcctcagggggatggggtggggtacaaccaccatgacaactgccgggagggccacgcaggtcgtggtcacctgccagcgactgtctcagactgggcagggaggctttggcatgacttaagaggaagggcagtcttgggcccgctatgcaggtcctggcaaacctggctgccctgtctccatccctgtccctcagggtagcaccatggcaggactgggggaactggagtgtccttgctgtatccctgttgtgaggttccttccaggggctggcactgaagcaagggtgctggggccccatggccttcagccctggctgagcaactgggctgtagggcagggccacttcctgaggtcaggtcttggtaggtgcctgcatctgtctgccttctggctgacaatcctggaaatctgttctccagaatccaggccaaaaagttcacagtcaaatggggaggggtattcttcatgcaggagaccccaggccctggaggctgcaacatacctcaatcctgtcccaggccggatcctcctgaagcccttttcgcagcactgctatcctccaaagccattgtaaatgtgtgtacagtgtgtataaaccttcttcttcttttttttttttaaactgaggattgtcattaaacacagttgttttctacctgcc

SEQ ID NO: 507 - DNA, 131 bp, Artificial
  Synthetic oligonucleotide
caagcccagcagccccggggcggatggctccggccgcctggctccgcagcgcggccgcgcgcgccctcctgcccccgatgctgctgctgctgctccagccgccgccgctgctggcccgggctctgccgccg

SEQ ID NO: 508 - DNA, 182 bp, Artificial
  Synthetic oligonucleotide
gacgtccaccacctccatgccgagaggagggggccacagccctggcatgcagccctgcccagtagcccggcacctgcccctgccacgcaggaagccccccggcctgccagcagcctcaggcctccccgctgtggcgtgcccgacccatctgatgggctgagtgcccgcaaccgacagaagag

SEQ ID NO: 509 - DNA, 144 bp, Artificial
  Synthetic oligonucleotide
gatccttcggttcccatggcagttggtgcaggagcaggtgcggcagacgatggcagaggccctaaaggtatggagcgatgtgacgccactcacctttactgaggtgcacgagggccgtgctgacatcatgatcgacttcgccag

SEQ ID NO: 510 - DNA, 134 bp, Artificial
  Synthetic oligonucleotide
gtactggcatggggacgacctgccgtttgatgggcctgggggcatcctggcccatgccttcttccccaagactcaccgagaaggggatgtccacttcgactatgatgagacctggactatcggggatgaccagg

SEQ ID NO: 511 - DNA, 183 bp, Artificial
  Synthetic oligonucleotide
acaacagcagccaaggccctgatgtccgccttctacacctttcgctacccactgagtctcagcccagatgactgcaggggcgttcaacacctatatggccagccctggcccactgtcacctccaggaccccagccctgggcccccaggctgggatagacaccaatgagattgcaccgctggag

SEQ ID NO: 512 - DNA, 217 bp, Artificial
  Synthetic oligonucleotide
ccagacgccccgccagatgcctgtgaggcctcctttgacgcggtctccaccatccgaggcgagctctttttcttcaaagcgggctttgtgtggcgcctccgtgggggccagctgcagcccggctacccagcattggcctctcgccactggcagggactgcccagccctgtggacgctgccttcgaggatgcccagggccacatttggttcttccaag

SEQ ID NO: 513 - DNA, 138 bp, Artificial
  Synthetic oligonucleotide
agctgggatttccatcctcaactggcagagatgagagcctggagcattgcagatgccagggacttcacaaatgaaggcacagcatgggaaacctgcgtgggttccagggcagtccagcctgcaggggcccagggagtg

SEQ ID NO: 514 - DNA, 300 bp, Artificial
  Synthetic oligonucleotide
gtcagtaggcatttgtcacagccaaatgccagtggaaggagcagccgcccaggcagccctctactgatgagagtaacctcacccgtgcactagtttacagagcattcactgccccagcttatcccaggcctcccgcttccctctgcgggtggggtgctgagcaggcattattggcctgcatgttttactgatgaggaaactgaggctgggagagtctgtggtaggggtcaagcaggtccacagtggcggggcatggcagtggtggctgggcaggtccttgcagccttccctctccggcag

SEQ ID NO: 515 - DNA, 142 bp, Artificial
  Synthetic oligonucleotide
gtgctcagtactgggtgtacgacggtgaaaagccagtcctgggccccgcacccctcaccgagctgggcctggtgaggttcccggtccatgctgccttggtctggggtcccgagaagaacaagatctacttcttccgaggcag

SEQ ID NO: 516 - DNA, 927 bp, Artificial
  Synthetic oligonucleotide
gtgcgttgggggtgaggcagctggtgggaggtgggcacagcagccgcttctcccacctggtggtggctgggctcccacatgcctgccacaggaagtctggctcttcatcacaggtcctttgtccagagccatctgccctcctctcggtggccggctagtgctacattccatattgcagatgaggaaactgagggtcagagaagtgcaaggtcttaccctggtttttcagccacagccagtagaacaataaactgctgtacactgagggccaacaatgctctaagctccttactggtctcatccagttctcagaacagccctctgatgtgacacctgttgtgaacccagtttccagaggagcaaacagaggctcaggcaatgaggcccctaacctggactaccctggtggtccctgctcctaaccactgacccacccagcctcccacaaccacagggggctagagccagtccagtgctccctcccctgctaggctcctcttctgtgctctttctcccacatcaggacccactgggagagctatcctagggtagcctccagctccaggactccagggtgcccgtcaatagcctggctaatttaatagatgcaggagagagtgatgtggagggtggtgggggcaacgggacttgctttcctgagaggtgggactcaggcctctgaggctctgggtacctgtcaggctgggtattagcccagcccagattccggggcaggcagaagggctccctagagggaagagaggttctgaaaggccggccctggatcctgcaggactcgaggaactcagcagtggccaagggcttcccactcagccctcccttagtgcccatccctgggcacagcctgacaggcaggagtagggcccagtgtccactcgcccaggcttgaccaccttctcttctcag

SEQ ID NO: 517 - DNA, 911 bp, Artificial
  Synthetic oligonucleotide
gctatgcctacttcctgcgcggccgcctctactggaagtttgaccctgtgaaggtgaaggctctggaaggcttcccccgtctcgtgggtcctgacttctttggctgtgccgagcctgccaacactttcctctgaccatggcttggatgccctcaggggtgctgacccctgccaggccacgaatatcaggctagagacccatggccatctttgtggctgtgggcaccaggcatgggactgagcccatgtctcctcagggggatggggtggggtacaaccaccatgacaactgccgggagggccacgcaggtcgtggtcacctgccagcgactgtctcagactgggcagggaggctttggcatgacttaagaggaagggcagtcttgggcccgctatgcaggtcctggcaaacctggctgccctgtctccatccctgtccctcagggtagcaccatggcaggactgggggaactggagtgtccttgctgtatccctgttgtgaggttccttccaggggctggcactgaagcaagggtgctggggccccatggccttcagccctggctgagcaactgggctgtagggcagggccacttcctgaggtcaggtcttggtaggtgcctgcatctgtctgccttctggctgacaatcctggaaatctgttctccagaatccaggccaaaaagttcacagtcaaatggggaggggtattcttcatgcaggagaccccaggccctggaggctgcaacatacctcaatcctgtcccaggccggatcctcctgaagcccttttcgcagcactgctatcctccaaagccattgtaaatgtgtgtacagtgtgtataaaccttcttcttcttttttttttttaaactgaggattgtcattaaacacagttgttttctacctgcc

SEQ ID NO: 518 - DNA, 48 bp, Artificial
  Synthetic oligonucleotide
gttcgtgctttctggcgggcgctgggagaagacggacctcacctacag

SEQ ID NO: 519 - DNA, 41 bp, Artificial
  Synthetic oligonucleotide
gcacagacctgctgcaggtggcagcccatgaatttggccac

SEQ ID NO: 520 - DNA, 18 bp, Artificial
  Synthetic oligonucleotide
gtgctggggctgcagcac

SEQ ID NO: 521 - DNA, 92 bp, Artificial
  Synthetic oligonucleotide
gtgaggccctgcctgccagtccccctactcctctgctggccactgtgactgcagcatatgccctcagcatgtgtccctctctcccaccccag

SEQ ID NO: 522 - DNA, 116 bp, Artificial
  Synthetic oligonucleotide
ggactactggcgtttccaccccagcacccggcgtgtagacagtcccgtgccccgcagggccactgactggagaggggtgccctctgagatcgacgctgccttccaggatgctgatg

SEQ ID NO: 523 - protein, 488 aa, Homo sapiens [sequence omitted]

SEQ ID NO: 524 - protein, 496 aa, Homo sapiens
MAPAAWLRSAAARALLPPMLLLLLQPPPLLARALPPDVHHLHAERRGPQPWHAALPSSPAPAPATQEAPRPASSLRPPRCGVPDPSDGLSARNRQKRFVLSGGRWEKTDLTYRILRFPWQLVQEQVRQTMAEALKVWSDVTPLTFTEVHEGRADIMIDFARYWHGDDLPFDGPGGILAHAFFPKTHREGDVHFDYDETWTIGDDQGTDLLQVAAHEFGHVLGLQHTTAAKALMSAFYTFRYPLSLSPDDCRGVQHLYGQPWPTVTSRTPALGPQAGIDTNEIAPLEPDAPPDACEASFDAVSTIRGELFFFKAGFVWRLRGGQLQPGYPALASRHWQGLPSPVDAAFEDAQGHIWFFQGAQYWVYDGEKPVLGPAPLTELGLVRFPVHAALVWGPEKNKIYFFRGRDYWRFHPSTRRVDSPVPRRATDWRGVPSEIDAAFQDADGALGVRQLVGGGHSSRFSHLVVAGLPHACHRKSGSSSQVLCPEPSALLSVAG

SEQ ID NO: 525 - protein, 382 aa, Homo sapiens
MAPAAWLRSAAARALLPPMLLLLLQPPPLLARALPPDVHHLHAERRGPQPWHAALPSSPAPAPATQEAPRPASSLRPPRCGVPDPSDGLSARNRQKRFVLSGGRWEKTDLTYRILRFPWQLVQEQVRQTMAEALKVWSDVTPLTFTEVHEGRADIMIDFARYWHGDDLPFDGPGGILAHAFFPKTHREGDVHFDYDETWTIGDDQGTDLLQVAAHEFGHVLGLQHTTAAKALMSAFYTFRYPLSLSPDDCRGVQHLYGQPWPTVTSRTPALGPQAGIDTNEIAPLEPDAPPDACEASFDAVSTIRGELFFFKAGFVWRLRGGQLQPGYPALASRHWQGLPSPVDAAFEDAQGHIWFFQELGFPSSTGRDESLEHCRCQGLHK

SEQ ID NO: 526 - protein, 370 aa, Homo sapiens
MAPAAWLRSAAARALLPPMLLLLLQPPPLLARALPPDVHHLHAERRGPQPWHAALPSSPAPAPATQEAPRPASSLRPPRCGVPDPSDGLSARNRQKRFVLSGGRWEKTDLTYRILRFPWQLVQEQVRQTMAEALKVWSDVTPLTFTEVHEGRADIMIDFARYWHGDDLPFDGPGGILAHAFFPKTHREGDVHFDYDETWTIGDDQGTDLLQVAAHEFGHVLGLQHTTAAKALMSAFYTFRYPLSLSPDDCRGVQHLYGQPWPTVTSRTPALGPQAGIDTNEIAPLEPDAPPDACEASFDAVSTIRGELFFFKAGFVWRLRGGQLQPGYPALASRHWQGLPSPVDAAFEDAQGHIWFFQGTTGVSTPAPGV

SEQ ID NO: 527 - protein, 301 aa, Homo sapiens
MAPAAWLRSAAARALLPPMLLLLLQPPPLLARALPPDVHHLHAERRGPQPWHAALPSSPAPAPATQEAPRPASSLRPPRCGVPDPSDGLSARNRQKRFVLSGGRWEKTDLTYRILRFPWQLVQEQVRQTMAEALKVWSDVTPLTFTEVHEGRADIMIDFARYWHGDDLPFDGPGGILAHAFFPKTHREGDVHFDYDETWTIGDDQGTDLLQVAAHEFGHVLGLQHTTAAKALMSAFYTFRYPLSLSPDDCRGVQHLYGQPWPTVTSRTPALGPQAGIDTNEIAPLEVRPCLPVPLLLCWPL

SEQ ID NO: 528 - protein, 354 aa, Homo sapiens [sequence omitted]

SEQ ID NO: 529 - DNA, 19 bp, Artificial
  Synthetic oligonucleotide
tgagagtgattcgcgtggg

SEQ ID NO: 530 - DNA, 21 bp, Artificial
  Synthetic oligonucleotide
ccagggtacgaggctttcaat

SEQ ID NO: 531 - DNA, 91 bp, Artificial
  Synthetic oligonucleotide
tgagagtgattcgcgtgggtacccgcaagagccagcttgctcgcatacagacggacagtgtggtggcaacattgaaagcctcgtaccctgg

SEQ ID NO: 532 - DNA, 21 bp, Artificial
  Synthetic oligonucleotide
tgacactggcaaaacaatgca

SEQ ID NO: 533 - DNA, 21 bp, Artificial
  Synthetic oligonucleotide
ggtccttttcaccagcaagct

SEQ ID NO: 534 - protein, 496 aa, Homo sapiens
MALRRLGAALLLLPLLAAVEETLMDSTTATAELGWMVHPPSGWEEVSGYDENMNTIRTYQVCNVFESSQNNWLRTKFIRRRGAHRIHVEMKFSVRDCSSIPSVPGSCKETFNLYYYEADFDSATKTFPNWMENPWVKVDTIAADESFSQVDLGGRVMKINTEVRSFGPVSRSGFYLAFQDYGGCMSLIAVRVFYRKCPRIIQNGAIFQETLSGAESTSLVAARGSCIANAEEVDVPIKLYCNGDGEWLVPIGRCMCKAGFEAVENGTVCRGCPSGTFKANQGDEACTHCPINSRTTSEGATNCVCRNGYYRADLDPLDMPCTTIPSAPQAVISSVNETSLMLEWTPPRDSGGREDLVYNIICKSCGSGRGACTRCGDNVQYAPRQLGLTEPRIYISDLLAHTQYTFEIQAVNGVTDQSPFSPQFASVNITTNQAAPSAVSIMHQVSRTVDSITLSWSQPDQPNGVILDYELQYYEKVPIGWVLSPSPTSLRAPLPG

SEQ ID NO: 535 - protein, 301 aa, Homo sapiens
MALRRLGAALLLLPLLAAVEETLMDSTTATAELGWMVHPPSGWEEVSGYDENMNTIRTYQVCNVFESSQNNWLRTKFIRRRGAHRIHVEMKFSVRDCSSIPSVPGSCKETFNLYYYEADFDSATKTFPNWMENPWVKVDTIAADESFSQVDLGGRVMKINTEVRSFGPVSRSGFYLAFQDYGGCMSLIAVRVFYRKCPRIIQNGAIFQETLSGAESTSLVAARGSCIANAEEVDVPIKLYCNGDGEWLVPIGRCMCKAGFEAVENGTVCRERQDLTMLSRLVLNSWPQMILPPQPPKVLEL

SEQ ID NO: 536 - protein, 324 aa, Homo sapiens
MGPPSAPPCRLHVPWKEVLLTASLLTFWNPPTTAKLTIESTPFNVAEGKEVLLLAHNLPQNRIGYSWYKGERVDGNSLIVGYVIGTQQATPGPAYSGRETIYPNASLLIQNVTQNDTGFYTLQVIKSDLVNEEATGQFHVYPELPKPSISSNNSNPVEDKDAVAFTCEPEVQNTTYLWWVNGQSLPVSPRLQLSNGNMTLTLLSVKRNDAGSYECEIQNPASANRSDPVTLNVLYGPDVPTISPSKANYRPGENLNLSCHAASNPPAQYSWFINGTFQQSTQELFIPNITVNNSGSYMCQAHNSATGLNRTTVTMITVSDWTRP

SEQ ID NO: 537 - protein, 256 aa, Homo sapiens
MGPPSAPPCRLHVPWKEVLLTASLLTFWNPPTTAKLTIESTPFNVAEGKEVLLLAHNLPQNRIGYSWYKGERVDGNSLIVGYVIGTQQATPGPAYSGRETIYPNASLLIQNVTQNDTGFYTLQVIKSDLVNEEATGQFHVYPELPKPSISSNNSNPVEDKDAVAFTCEPEVQNTTYLWWVNGQSLPVSPRLQLSNGNMTLTLLSVKRNDAGSYECEIQNPASANRSDPVTLNVLLLLSSQLWPPSASRLECWPGWL

SEQ ID NO: 538 - protein, 390 aa, Homo sapiens
MGPPSAPPCRLHVPWKEVLLTASLLTFWNPPTTAKLTIESTPFNVAEGKEVLLLAHNLPQNRIGYSWYKGERVDGNSLIVGYVIGTQQATPGPAYSGRETIYPNASLLIQNVTQNDTGFYTLQVIKSDLVNEEATGQFHVYPELPKPSISSNNSNPVEDKDAVAFTCEPEVQNTTYLWWVNGQSLPVSPRLQLSNGNMTLTLLSVKRNDAGSYECEIQNPASANRSDPVTLNVLYGPDVPTISPSKANYRPGENLNLSCHAASNPPAQYSWFINGTFQQSTQELFIPNITVNNSGSYMCQAHNSATGLNRTTVTMITVSGKWIHEALASHFQVESGSQRRARKKFSFPTCVQGAHANPKFSPEPSQFTSADSFPLVFLFFVVFCFLISHV

SEQ ID NO: 539 - protein, 183 aa, Homo sapiens
MGPPSAPPCRLHVPWKEVLLTASLLTFWNPPTTAKLTIESTPFNVAEGKEVLLLAHNLPQNRIGYSWYKGERVDGNSLIVGYVIGTQQATPGPAYSGRETIYPNASLLIQNVTQNDTGFYTLQVIKSDLVNEEATGQFHVYREYFHMTSGCWGSVLLPTYGIVRPGLCLWPSLHYILYQGLDI

SEQ ID NO: 540 - protein, 180 aa, Homo sapiens [sequence omitted]

SEQ ID NO: 541 - protein, 584 aa, Homo sapiens
MTPSPLLLLLLPPLLLGAFPPAAAARGPPKMADKVVPRQVARLGRTVRLQCPVEGDPPPLTMWTKDGRTIHSGWSRFRVLPQGLKVKQVEREDAGVYVCKATNGFGSLSVNYTLVVLDDISPGKESLGPDSSSGGQEDPASQQWARPRFTQPSKMRRRVIARPVGSSVRLKCVASGHPRPDITWMKDDQALTRPEAAEPRKKKWTLSLKNLRPEDSGKYTCRVSNRAGAINATYKVDVIQRTRSKPVLTGTHPVNTTVDFGGTTSFQCKVRSDVKPVIQWLKRVEYGAEGRHNSTIDVGGQKFVVLPTGDVWSRPDGSYLNKLLITRARQDDAGMYICLGANTMGYSFRSAFLTVLPGARLPRHATPCWCPDPPPGPGVPPTGWGPTLPSRAVLARSSAEGGQPRGTVSTAPGMGLGCSPGLCVGVPLPTSFPLALADPKPPGPPVASSSSATSLPWPVVIGIPAGAVFILGTLLLWLCQAQKKPCTPAPAPPLPGHRPPGTARDRSGDKDLPSLAALSAGPGVGLCEEHGSPAAPQHLLGPGPVAGPKLYPKLYTDIHTHTHTHSHTHSHVEGKVHQHIHYQC

SEQ ID NO: 542 - protein, 490 aa, Homo sapiens
MTPSPLLLLLLPPLLLGAFPPAAAARGPPKMADKVVPRQVARLGRTVRLQCPVEGDPPPLTMWTKDGRTIHSGWSRFRVLPQGLKVKQVEREDAGVYVCKATNGFGSLSVNYTLVVLDDISPGKESLGPDSSSGGQEDPASQQWARPRFTQPSKMRRRVIARPVGSSVRLKCVASGHPRPDITWMKDDQALTRPEAAEPRKKKWTLSLKNLRPEDSGKYTCRVSNRAGAINATYKVDVIQRTRSKPVLTGTHPVNTTVDFGGTTSFQCKTQNRQGHLWPPRPRPLACRGPWSSASQPALSSSWAPCSCGFARPRRSRAPPRLPLPCLGTARRGRPATAAETRTFPRWPPSALALVWGCVRSMGLRQPPSTYWAQAQLLALSCTPNSTQTSTHTHTHTLTHTHTWRARSTSTSTISARRHRICSGHGGAGQTGRLGGWRTELQTKAGDPWRGGMASTPGSLCVRHSPWTHTHRHTHYLDACMHTHARTRAP

SEQ ID NO: 543 - protein, 81 aa, Homo sapiens
MSLLSSRAARVPGPSSSLCALLVLLLLLTQPGPIASAGPAAAVLRELRCVCLQTTQGVHPKMISNLQVFAIGPQCSKVEVV

SEQ ID NO: 544 - protein, 75 aa, Homo sapiens
MAHATLSAAPSNPRLLRVALLLLLLVAASRRAAGASVVTELRCQCLQTLQGIHLKNIQSVNVRSPGPHCAQTEVM

SEQ ID NO: 545 - protein, 103 aa, Homo sapiens
MAHATLSAAPSNPRLLRVALLLLLLVAASRRAAGASVVTELRCQCLQTLQGIHLKNIQSVNVRSPGPHCAQTEVIATLKNGKKACLNPASPMVQKIIEKILNK

SEQ ID NO: 546 - protein, 98 aa, Homo sapiens
MAHATLSAAPSNPRLLRVALLLLLLVAASRRAAGASVVTELRCQCLQTLQGIHLKNIQSVNSHTQEWEESLSQPRIPHGSENHRKDTEQGEHQLTGEK

SEQ ID NO: 547 - protein, 177 aa, Homo sapiens
MHKKGSPILGSHTARVAGTSPPALPLLAQLPDASAEPHGPRHALRRPQQSPAPAGGAAAPAPGGRQPARSRWVPAPWGPRAGRGWGGRPAPTAPLNQRVYSSLGASVVTELRCQCLQTLQGIHLKNIQSVNVRSPGPHCAQTEVIATLKNGKKACLNPASPMVQKIIEKILNKGSTN

SEQ ID NO: 548 - protein, 340 aa, Homo sapiens
MKSLTATSSMKVLLPRTFWTRKLMKFLLLLVLRIATDDSKAVCRLSVKFGATLRTSRLLLERAKELNIDVVGVSFHVGSGCTDPETFVQAISDARCVFDMGAEVGFSMYLLDIGGGFPGSEDVKLKFEEITGVINPALDKYFPSDSGVRIIAEPGRYYVASAFTLAVNIIAKKIVLKEQTGSDDEDESSEQTFMYYVNDGVYGSFNCILYDHAHVKPLLQKRPKPDEKYYSSSIWGPTCDGLDRIVERCDLPEMHVGDWMLFENMGAYTVAAASTFNGFQRPTIYYVMSGPAWQLMQQFQNPDFPPEVEEQDASTLPVSCAWESGMKRHRAACASASINV

SEQ ID NO: 549 - protein, 238 aa, Homo sapiens
MAEKALLCPSSAGLGTWPWVLNSAWPVLPLAVDQGVDWRPRGPVSSDQIEQLHRRFKQLSGDQPTIRKENFNNVPDLELNPIRSKIVRAFFDNRNLRKGPSGLADEINFEDFLTIMSYFRPIDTTMDEEQVELSRKEKLRFLFHMYDSDSDGRITLEEYRNVVEELLSGNPHIEKESARSIADGAMMEAASVCMGQMEPDQVYEGITFEDFLKIWQGIDIETKMHVRFLNMETMALCH

SEQ ID NO: 550 - protein, 302 aa, Homo sapiens
GGGGRADWRPKGRWGRGLAPAAGWGAGVRGPGGAGPRSLPRGGVGAALPLAHTVRLQSAASPAARSAPAWPGPQELFYEDRHFHEGCFRCCRCQRSLADEPFTCQDSELLCNDCYCSAFSSQCSACGETVMPGSRKLEYGGQTWHEHCFLCSGCEQPLGSRSFVPDKGAHYCVPCYENKFAPRCARCSKTLTQGGVTYRDQPWHRECLVCTGCQTPLAGQQFTSRDEDPYCVACFGELFAPKCSSCKRPIVGLGGGKYVSFEDRHWHHNCFSCARCSTSLVGQGFVPDGDQVLCQGCSQAGP

SEQ ID NO: 551 - protein, 147 aa, Homo sapiens
MNPSPARTVSCSAMTATAVRFPRSAPLVGRLSCLTLTQGGVTYRDQPWHRECLVCTGCQTPLAGQQFTSRDEDPYCVACFGELFAPKCSSCKRPIVGLGGGKYVSFEDRHWHHNCFSCARCSTSLVGQGFVPDGDQVLCQGCSQAGP

SEQ ID NO: 552 - protein, 215 aa, Homo sapiens
MVDAFLGTWKLVDSKNFDDYMKSLGVGFATRQVASMTKPTTIIEKNGDILTLKTHSTFKNTEISFKLGVEFDETTADDRKVKSIVTLDGGKLVHLQKWDGQETTLVRELIDGKLILVRWATLELYLIGYYYCSFSQACSKKPSPPLRAVEAGTREWLWVRVVSGGNFLCSGFGLTQAGTQILPYRLHDCGQITFSKCNCKTGINNTNLVGLLGSL

SEQ ID NO: 553 - protein, 178 aa, Homo sapiens
MVDAFLGTWKLVDSKNFDDYMKSLGVGFATRQVASMTKPTTIIEKNGDILTLKTHSTFKNTEISFKLGVEFDETTADDRKVKSIVTLDGGKLVHLQKWDGQETTLVRELIDGKLILDVLTAWPSIYRRQVKVLREDEITILPWHLQWSREKATKLLRPTLPSYNNHGWEELRVGKSIV

SEQ ID NO: 554 - protein, 126 aa, Homo sapiens
MVDAFLGTWKLVDSKNFDDYMKSLGVGFATRQVASMTKPTTIIEKNGDILTLKTHSTFKNTEISFKLGVEFDETTADDRKVKSIVTLDGGKLVHLQKWDGQETTLVRELIDGKLILMEKLQLRNVK

SEQ ID NO: 555 - protein, 144 aa, Homo sapiens
MVDAFLGTWKLVDSKNFDDYMKSLAHILITFPLPSGVGFATRQVASMTKPTTIIEKNGDILTLKTHSTFKNTEISFKLGVEFDETTADDRKVKSIVTLDGGKLVHLQKWDGQETTLVRELIDGKLILTLTHGTAVCTRTYEKEA

SEQ ID NO: 556 - protein, 464 aa, Homo sapiens
MLLPQLCWLPLLAGLLPPVPAQKFSALTFLRVDQDKDKDCSLDCAGSPQKPLCASDGRTFLSRCEFQRAKCKDPQLEIAYRGNCKDVSRCVAERKYTQEQARKEFQQVFIPECNDDGTYSQVQCHSYTGYCWCVTPNGRPISGTAVAHKTPRCPGSVNEKLPQREGTGKTDDAAAPALETQPQGDEEDIASRYPTLWTEQVKSRQNKTNKNSVSSCDQEHQSALEEAKQPKNDNVVIPECAHGGLYKPVQCHPSTGYCWCVLVDTGRPIPGTSTRYEQPKCDNTARAHPAKARDLYKGRQLQGCPGAKKHEFLTSVLDALSTDMVHAASDPSSSSGRLSEPDPSHTLEERVVHWYFKLLDKNSSGDIGKKEIKPFKRFLRKKSKPKKCVKKFVEYCDVNNDKSISVQELMGCLGVAKEDGKADTKKRHTPRGHAESTSNRQDAMVVSSRPKATTHRKSRTLSRR

SEQ ID NO: 557 - protein, 434 aa, Homo sapiens
MLLPQLCWLPLLAGLLPPVPAQKFSALTFLRVDQDKDKDCSLDCAGSPQKPLCASDGRTFLSRCEFQRAKCKDPQLEIAYRGNCKDVSRCVAERKYTQEQARKEFQQVFIPECNDDGTYSQVQCHSYTGYCWCVTPNGRPISGTAVAHKTPRCPGSVNEKLPQREGTGKTDDAAAPALETQPQGDEEDIASRYPTLWTEQVKSRQNKTNKNSVSSCDQEHQSALEEAKQPKNDNVVIPECAHGGLYKPVQCHPSTGYCWCVLVDTGRPIPGTSTRYEQPKCDNTARAHPAKARDLYKGRQLQGCPGAKKHEFLTSVLDALSTDMVHAASDPSSSSGRLSEPDPSHTLEERVVHWYFKLLDKNSSGDIGKKEIKPFKRFLRKKSKPKKCVKKFVEYCDVNNDKSISVQELMGCLGVAKEDGKADTKKRHRSKRNL

SEQ ID NO: 558 - protein, 454 aa, Homo sapiens
MLLPQLCWLPLLAGLLPPVPAQKFSALTFLRVDQDKDKDCSLDCAGSPQKPLCASDGRTFLSRCEFQRAKCKDPQLEIAYRGNCKDVSRCVAERKYTQEQARKEFQQVFIPECNDDGTYSQVQCHSYTGYCWCVTPNGRPISGTAVAHKTPRCPGSVNEKLPQREGTGKTDDAAAPALETQPQGDEEDIASRYPTLWTEQVKSRQNKTNKNSVSSCDQEHQSALEEAKQPKNDNVVIPECAHGGLYKPVQCHPSTGYCWCVLVDTGRPIPGTSTRYEQPKCDNTARAHPAKARDLYKGRQLQGCPGAKKHEFLTSVLDALSTDMVHAASDPSSSSGRLSEPDPSHTLEERVVHWYFKLLDKNSSGDIGKKEIKPFKRFLRKKSKPKKCVKKFVEYCDVNNDKSISVQELMGCLGVAKEDGKADTKKRHTPRGHAESTSNRQLLWLRGKVSFYCF

SEQ ID NO: 559 - protein, 429 aa, Homo sapiens
MLLPQLCWLPLLAGLLPPVPAQKFSALTFLRVDQDKDKDCSLDCAGSPQKPLCASDGRTFLSRCEFQRAKCKDPQLEIAYRGNCKDVSRCVAERKYTQEQARKEFQQVFIPECNDDGTYSQVQCHSYTGYCWCVTPNGRPISGTAVAHKTPRCPGSVNEKLPQREGTGKTDIASRYPTLWTEQVKSRQNKTNKNSVSSCDQEHQSALEEAKQPKNDNVVIPECAHGGLYKPVQCHPSTGYCWCVLVDTGRPIPGTSTRYEQPKCDNTARAHPAKARDLYKGRQLQGCPGAKKHEFLTSVLDALSTDMVHAASDPSSSSGRLSEPDPSHTLEERVVHWYFKLLDKNSSGDIGKKEIKPFKRFLRKKSKPKKCVKKFVEYCDVNNDKSISVQELMGCLGVAKEDGKADTKKRHTPRGHAESTSNRQPRKQG

SEQ ID NO: 560 - protein, 139 aa, Homo sapiens
MKSSGLFPFLVLLALGTLAPWAVEGSGKSFKAGVCPPKKSAQCLRYKKPECQSDWQCPGKKRCCPDTCGIKCLDPVDTPNPTRRKPGKCPVTYGQCLMLNPPNFCEMDGQCKRDLKCCMGMCGKSCVSPVKGKQGMRAH

SEQ ID NO: 561 - protein, 156 aa, Homo sapiens
MKSSGLFPFLVLLALGTLAPWAVEGSGKSFKAGVCPPKKSAQCLRYKKPECQSDWQCPGKKRCCPDTCGIKCLDPVDTPNPTRRKPGKCPVTYGQCLMLNPPNFCEMDGQCKRDLKCCMGMCGKSCVSPVKGEKRHHKQLRDQEVDPLEMRRHSAG

SEQ ID NO: 562 - protein, 89 aa, Homo sapiens
MKSSGLFPFLVLLALGTLAPWAVEGSGKSFKAGVCPPKKSAQCLRYKKPECQSDWQCPGKKRCCPDTCGIKCLDPVDTPNPRGSLGSAQ

SEQ ID NO: 563 - protein, 82 aa, Homo sapiens
MKSSGLFPFLVLLALGTLAPWAVEGSGKSFKAGVCPPKKSAQCLRYKKPECQSDWQCPGKKRCCPDTCGIKCLDPVDTPNPT

SEQ ID NO: 564 - protein, 1645 aa, Homo sapiens
MFPGCPRLWVLVVLGTSWVGWGSQGTEAAQLRQFYVAAQGISWSYRPEPTNSSLNLSVTSFKKIVYREYEPYFKKEKPQSTISGLLGPTLYAEVGDIIKVHFKNKADKPLSIHPQGIRYSKLSEGASYLDHTFPAEKMDDAVAPGREYTYEWSISEDSGPTHDDPPCLTHIYYSHENLIEDFNSGLIGPLLICKKGTLTEGGTQKTFDKQIVLLFAVFDESKSWSQSSSLMYTVNGYVNGTMPDITVCAHDHISWHLLGMSSGPELFSIHFNGQVLEQNHHKVSAITLVSATSTTANMTVGPEGKWIISSLTPKHLQAGMQAYIDIKNCPKKTRNLKKITREQRRHMKRWEYFIAAEEVIWDYAPVIPANMDKKYRSQHLDNFSNQIGKHYKKVMYTQYEDESFTKHTVNPNMKEDGILGPIIRAQVRDTLKIVFKNMASRPYSIYPHGVTFSPYEDEVNSSFTSGRNNTMIRAVQPGETYTYKWNILEFDEPTENDAQCLTRPYYSDVDIMRDIASGLIGLLLICKSRSLDRRGIQRAADIEQQAVFAVFDENKSWYLEDNINKFCENPDEVKRDDPKFYESNIMSTINGYVPESITTLGFCFDDTVQWHFCSVGTQNEILTIHFTGHSFIYGKRHEDTLTLFPMRGESVTVTMDNVGTWMLTSMNSSPRSKKLRLKFRDVKCIPDDDEDSYEIFEPPESTVMATRKMHDRLEPEDEESDADYDYQNRLAAALGIRSFRNSSLNQEEEEFNLTALALENGTEFVSSNTDIIVGSNYSSPSNISKFTVNNLAEPQKAPSHQQATTAGSPLRHLIGKNSVLNSSTAEHSSPYSEDPIEDPLQPDVTGIRLLSLGAGEFRSQEHAKRKGPKVERDQAAKHRFSWMKLLAHKVGRHLSQDTGSPSGMRPWEDLPSQDTGSPSRMRPWKDPPSDLLLLKQSNSSKILVGRWHLASEKGSYEIIQDTDEDTAVNNWLISPQNASRAWGESTPLANKPGKQSGHPKFPRVRHKSLQVRQDGGKSRLKKSQFLIKTRKKKKEKHTHHAPLSPRTFHPLRSEAYNTFSERRLKHSLVLHKSNETSLPTDLNQTLPSMDFGWIASLPDHNQNSSNDTGQASCPPGLYQTVPPEEHYQTFPIQDPDQMHSTSDPSHRSSSPELSEMLEYDRSHKSFPTDISQMSPSSEHEVWQTVISPDLSQVTLSPELSQTNLSPDLSHTTLSPELIQRNLSPALGQMPISPDLSHTTLSPDLSHTTLSLDLSQTNLSPELSQTNLSPALGQMPLSPDLSHTTLSLDFSQTNLSPELSHMTLSPELSQTNLSPALGQMPISPDLSHTTLSLDFSQTNLSPELSQTNLSPALGQMPLSPDPSHTTLSLDLSQTNLSPELSQTNLSPDLSEMPLFADLSQIPLTPDLDQMTLSPDLGETDLSPNFGQMSLSPDLSQVTLSPDISDTTLLPDLSQISPPPDLDQIFYPSESSQSLLLQEFNESFPYPDLGQMPSPSSPTLNDTFLSKEFNPLVIVGLSKDGTDYIEIIPKEEVQSSEDDYAEIDYVPYDDPYKTDVRTNINSSRDPDNIAAWYLRSNNGNRRNYYIAAEEISWDYSEFVQRETDIEDSDDIPEDTTYKKGSMKSISEFLVLLSELKWMMLSKFVLKI

SEQ ID NO: 565 - protein, 2074 aa, Homo sapiens
MFPGCPRLWVLVVLGTSWVGWGSQGTEAAQLRQFYVAAQGISWSYRPEPTNSSLNLSVTSFKKIVYREYEPYFKKEKPQSTISGLLGPTLYAEVGDIIKVHFKNKADKPLSIHPQGIRYSKLSEGASYLDHTFPAEKMDDAVAPGREYTYEWSISEDSGPTHDDPPCLTHIYYSHENLIEDFNSGLIGPLLICKKGTLTEGGTQKTFDKQIVLLFAVFDESKSWSQSSSLMYTVNGYVNGTMPDITVCAHDHISWHLLGMSSGPELFSIHFNGQVLEQNHHKVSAITLVSATSTTANMTVGPEGKWIISSLTPKHLQAGMQAYIDIKNCPKKTRNLKKITREQRRHMKRWEYFIAAEEVIWDYAPVIPANMDKKYRSQHLDNFSNQIGKHYKKVMYTQYEDESFTKHTVNPNMKEDGILGPIIRAQVRDTLKIVFKNMASRPYSIYPHGVTFSPYEDEVNSSFTSGRNNTMIRAVQPGETYTYKWNILEFDEPTENDAQCLTRPYYSDVDIMRDIASGLIGLLLICKSRSLDRRGIQRAADIEQQAVFAVFDENKSWYLEDNINKFCENPDEVKRDDPKFYESNIMSTINGYVPESITTLGFCFDDTVQWHFCSVGTQNEILTIHFTGHSFIYGKRHEDTLTLFPMRGESVTVTMDNVGTWMLTSMNSSPRSKKLRLKFRDVKCIPDDDEDSYEIFEPPESTVMATRKMHDRLEPEDEESDADYDYQNRLAAALGIRSFRNSSLNQEEEEFNLTALALENGTEFVSSNTDIIVGSNYSSPSNISKFTVNNLAEPQKAPSHQQATTAGSPLRHLIGKNSVLNSSTAEHSSPYSEDPIEDPLQPDVTGIRLLSLGAGEFRSQEHAKRKGPKVERDQAAKHRFSWMKLLAHKVGRHLSQDTGSPSGMRPWEDLPSQDTGSPSRMRPWKDPPSDLLLLKQSNSSKILVGRWHLASEKGSYEIIQDTDEDTAVNNWLISPQNASRAWGESTPLANKPGKQSGHPKFPRVRHKSLQVRQDGGKSRLKKSQFLIKTRKKKKEKHTHHAPLSPRTFHPLRSEAYNTFSERRLKHSLVLHKSNETSLPTDLNQTLPSMDFGWIASLPDHNQNSSNDTGQASCPPGLYQTVPPEEHYQTFPIQDPDQMHSTSDPSHRSSSPELSEMLEYDRSHKSFPTDISQMSPSSEHEVWQTVISPDLSQVTLSPELSQTNLSPDLSHTTLSPELIQRNLSPALGQMPISPDLSHTTLSPDLSHTTLSLDLSQTNLSPELSQTNLSPALGQMPLSPDLSHTTLSLDFSQTNLSPELSHMTLSPELSQTNLSPALGQMPISPDLSHTTLSLDFSQTNLSPELSQTNLSPALGQMPLSPDPSHTTLSLDLSQTNLSPELSQTNLSPDLSEMPLFADLSQIPLTPDLDQMTLSPDLGETDLSPNFGQMSLSPDLSQVTLSPDISDTTLLPDLSQISPPPDLDQIFYPSESSQSLLLQEFNESFPYPDLGQMPSPSSPTLNDTFLSKEFNPLVIVGLSKDGTDYIEIIPKEEVQSSEDDYAEIDYVPYDDPYKTDVRTNINSSRDPDNIAAWYLRSNNGNRRNYYIAAEEISWDYSEFVQRETDIEDSDDIPEDTTYKKVVFRKYLDSTFTKRDPRGEYEEHLGILGPIIRAEVDDVIQVRFKNLASRPYSLHAHGLSYEKSSEGKTYEDDSPEWFKEDNAVQPNSSYTYVWHATERSGPESPGSACRAWAYYSAVNPEKDIHSGLIGPLLICQKGILHKDSNMPVDMREFVLLFMTFDEKKSWYYEKKSRSSWRLTSSEMKKSHEFHAINGMIYSLPGLKMYEQEWVRLHLLNIGGSQDIHVVHFHGQTLLENGNKQHQLGVWPLLPGSFKTLEMKASKPGWWLLNTEVGENQRAGMQTPFLIMDRDCRMPMGLSTGIISDSQIKASEFLGYWEPRLARLNNGGSYNAWSVEKLAAEFASKPWIQVDMQKEVIITGIQTQGAKHYLKSCYTTEFYVAYSSNQINWQIFKGNSTRNVMYFNGNSDASTIKENQFDPPIVARYIRISPTRAYNRPTLRLELQGCEDVPHPWVWKMER

SEQ ID NO: 566 - protein, 603 aa, Homo sapiens
MFPGCPRLWVLVVLGTSWVGWGSQGTEAAQLRQFYVAAQGISWSYRPEPTNSSLNLSVTSFKKIVYREYEPYFKKEKPQSTISGLLGPTLYAEVGDIIKVHFKNKADKPLSIHPQGIRYSKLSEGASYLDHTFPAEKMDDAVAPGREYTYEWSISEDSGPTHDDPPCLTHIYYSHENLIEDFNSGLIGPLLICKKGTLTEGGTQKTFDKQIVLLFAVFDESKSWSQSSSLMYTVNGYVNGTMPDITVCAHDHISWHLLGMSSGPELFSIHFNGQVLEQNHHKVSAITLVSATSTTANMTVGPEGKWIISSLTPKHLQAGMQAYIDIKNCPKKTRNLKKITREQRRHMKRWEYFIAAEEVIWDYAPVIPANMDKKYRSQHLDNFSNQIGKHYKKVMYTQYEDESFTKHTVNPNMKEDGILGPIIRAQVRDTLKIVFKNMASRPYSIYPHGVTFSPYEDEVNSSFTSGRNNTMIRAVQPGETYTYKWNILEFDEPTENDAQCLTRPYYSDVDIMRDIASGLIGLLLICKSRSLDRRGIQRAADIEQQAVFAVFDENKSWYLEDNINKFCENPDEVKRDDPKFYESNIMSSKSEYYFCSSVFHSCG

SEQ ID NO: 567 - protein, 156 aa, Homo sapiens
MWTFVTQLLVTLVLLSFFLVSCQNVMHIVRGSLCFVLKHIHQELDKELGESEGLSDDEETISTRVVRRRVFLKGNEFQNIPGEQVTEEQFTDEQGNIVTKKIIRKVVRQIDLSSADAAQEHEEVTVEGPLEDPSELEVDIDYFMKHSKDHTSTPNP

SEQ ID NO: 568 - protein, 169 aa, Homo sapiens
MWTFVTQLLVTLVLLSFFLVSCQNVMHIVRGSLCFVLKHIHQELDKELGESEGLSDDEETISTRVVRRRVFLKGNEFQNIPGEQVTEEQFTDEQGNIVTKKIIRKVVRQIDLSSADAAQEHEEVTVEGPLEDPSELEVELRGSGLQPDLIEGRKGAQIVKRASLKRGKQ

SEQ ID NO: 569 - protein, 180 aa, Homo sapiens
MWTFVTQLLVTLVLLSFFLVSCQNVMHIVRGSLCFVLKHIHQELDKELGESEGLSDDEETISTRVVRRRVFLKGNEFQNIPGEQVTEEQFTDEQGNIVTKKIIRKVVRQIDLSSADAAQEHEEVTVEGPLEDPSELEVDIDYFMKHSKVELRGSGLQPDLIEGRKGAQIVKRASLKRGKQ

SEQ ID NO: 570 - protein, 145 aa, Homo sapiens
MWTFVTQLLVTLVLLSFFLVSCQNVMHIVRGSLCFVLKHIHQELDKELGESEGLSDDEETISTRVVRRRVFLKGNEFQNIPGEQVTEEQFTDEQGNIVTKKIIRKVVRQIDLSSADAAQEHEEVTVEGPLEDPSELEDHTSTPNP

SEQ ID NO: 571 - protein, 122 aa, Homo sapiens
MWTFVTQLLVTLVLLSFFLVSCQNVMHIVRGSLCFVLKHIHQELDKELGESEGLSDDEETISTRVVRRRVFLKGNEFQNIPGEQVTEEQFTDEQGNIVTKKVGAECSPLCWGEAGGLEAKRW

SEQ ID NO: 572 - protein, 155 aa, Homo sapiens
MWTFVTQLLVTLVLLSFFLVSCQNVMHIVRGSLCFVLKHIHQELDKELGESEGLSDDEETISPRVVRRRVFLKGNEFQNIPGEQVTEEQFTDEQGNIVTKKIIRKVVRQIDLSSADAAQEHEEVELRGSGLQPDLIEGRKGAQIVKRASLKRGKQ

SEQ ID NO: 573 - protein, 109 aa, Homo sapiens
MWTFVTQLLVTLVLLSFFLVSCQNVMHIVRGSLCFVLKHIHQELDKELGESEGLSDDEETISPRVVRRRVFLKGNEFQNIPGEQVTEEQFTDEQGNIVTKKDHTSTPNP

SEQ ID NO: 574 - protein, 133 aa, Homo sapiens
MWTFVTQLLVTLVLLSFFLVSCQNVMHIVRGSLCFVLKHIHQELDKELGESEGLSDDEETISPRVVRRRVFLKGNEFQNIPGEQVTEEQFTDEQGNIVTKKVELRGSGLQPDLIEGRKGAQIVKRASLKRGKQ

SEQ ID NO: 575 - protein, 30 aa, Homo sapiens
MILANVFCLFFFLGPRAPRLAPPSGLCPGQ

SEQ ID NO: 576 - protein, 1081 aa, Homo sapiens
MEPWSSRWKTKRWLWDFTVTTLALTFLFQAREVRGAAPVDVLKALDFHNSPEGISKTTGFCTNRKNSKGSDTAYRVSKQAQLSAPTKQLFPGGTFPEDFSILFTVKPKKGIQSFLLSIYNEHGIQQIGVEVGRSPVFLFEDHTGKPAPEDYPLFRTVNIADGKWHRVAISVEKKTVTMIVDCKKKTTKPLDRSERAIVDTNGITVFGTRILDEEVFEGDIQQFLITGDPKAAYDYCEHYSPDCDSSAPKAAQAQEPQIDEYAPEDIIEYDYEYGEAEYKEAESVTEGPTVTEETIAQTEANIVDDFQEYNYGTMESYQTEAPRHVSGTNEPNPVEEIFTEEYLTGEDYDSQRKNSEDTLYENKEIDGRDSDLLVDGDLGEYDFYEYKEYEDKPTSPPNEEFGPGVPAETDITETSINGHGAYGEKGQKGEPAVVEPGMLVEGPPGPAGPAGIMGPPGLQGPTGPPGDPGDRGPPGRPGLPGADGLPGPPGTMLMLPFRYGGDGSKGPTISAQEAQAQAILQQARIALRGPPGPMGLTGRPGPVGGPGSSGAKGESGDPGPQGPRGVQGPPGPTGKPGKRGRPGADGGRGMPGEPGAKGDRGFDGLPGLPGDKGHRGERGPQGPPGPPGDDGMRGEDGEIGPRGLPGEAGPRGLLGPRGTPGAPGQPGMAGVDGPPGPKGNMGPQGEPGPPGQQGNPGPQGLPGPQGPIGPPGEKGPQGKPGLAGLPGADGPPGHPGKEGQSGEKGALGPPGPQGPIGYPGPRGVKGADGVRGLKGSKGEKGEDGFPGFKGDMGLKGDRGEVGQIGPRGEDGPEGPKGRAGPTGDPGPSGQAGEKGKLGVPGLPGYPGRQGPKGSTGFPGFPGANGEKGARGVAGKPGPRGQRGPTGPRGSRGARGPTGKPGPKGTSGGDGPPGPPGERGPQGPQGPVGFPGPKGPPGPPGKDGLPGHPGQRGETGFQGKTGPPGPGGVVGPQGPTGETGPIGERGHPGPPGPPGEQGLPGAAGKEGAKGDPGPQGISGKDGPAGLRGFPGERGLPGAQGAPGLKGGEGPQGPPGPVVSMMIINSQTIMVVNYSSSFITLML

SEQ ID NO: 577 - protein, 729 aa, Homo sapiens
MEPWSSRWKTKRWLWDFTVTTLALTFLFQAREVRGAAPVDVLKALDFHNSPEGISKTTGFCTNRKNSKGSDTAYRVSKQAQLSAPTKQLFPGGTFPEDFSILFTVKPKKGIQSFLLSIYNEHGIQQIGVEVGRSPVFLFEDHTGKPAPEDYPLFRTVNIADGKWHRVAISVEKKTVTMIVDCKKKTTKPLDRSERAIVDTNGITVFGTRILDEEVFEGDIQQFLITGDPKAAYDYCEHYSPDCDSSAPKAAQAQEPQIDEYAPEDIIEYDYEYGEAEYKEAESVTEGPTVTEETIAQTEANIVDDFQEYNYGTMESYQTEAPRHVSGTNEPNPVEEIFTEEYLTGEDYDSQRKNSEDTLYENKEIDGRDSDLLVDGDLGEYDFYEYKEYEDKPTSPPNEEFGPGVPAETDITETSINGHGAYGEKGQKGEPAVVEPGMLVEGPPGPAGPAGIMGPPGLQGPTGPPGDPGDRGPPGRPGLPGADGLPGPPGTMLMLPFRYGGDGSKGPTISAQEAQAQAILQQARIALRGPPGPMGLTGRPGPVGGPGSSGAKGESGDPGPQGPRGVQGPPGPTGKPGKRGRPGADGGRGMPGEPGAKGDRGFDGLPGLPGDKGHRGERGPQGPPGPPGDDGMRGEDGEIGPRGLPGEAGPRGLLGPRGTPGAPGQPGMAGVDGPPGPKGNMGPQGEPGPPGQQGNPGPQGLPGPQGPIGPPGEKMCCNLSFGILIPLQK

SEQ ID NO: 578 - protein, 738 aa, Homo sapiens
MEPWSSRWKTKRWLWDFTVTTLALTFLFQAREVRGAAPVDVLKALDFHNSPEGISKTTGFCTNRKNSKGSDTAYRVSKQAQLSAPTKQLFPGGTFPEDFSILFTVKPKKGIQSFLLSIYNEHGIQQIGVEVGRSPVFLFEDHTGKPAPEDYPLFRTVNIADGKWHRVAISVEKKTVTMIVDCKKKTTKPLDRSERAIVDTNGITVFGTRILDEEVFEGDIQQFLITGDPKAAYDYCEHYSPDCDSSAPKAAQAQEPQIDEYAPEDIIEYDYEYGEAEYKEAESVTEGPTVTEETIAQTEANIVDDFQEYNYGTMESYQTEAPRHVSGTNEPNPVEEIFTEEYLTGEDYDSQRKNSEDTLYENKEIDGRDSDLLVDGDLGEYDFYEYKEYEDKPTSPPNEEFGPGVPAETDITETSINGHGAYGEKGQKGEPAVVEPGMLVEGPPGPAGPAGIMGPPGLQGPTGPPGDPGDRGPPGRPGLPGADGLPGPPGTMLMLPFRYGGDGSKGPTISAQEAQAQAILQQARIALRGPPGPMGLTGRPGPVGGPGSSGAKGESGDPGPQGPRGVQGPPGPTGKPGKRGRPGADGGRGMPGEPGAKGDRGFDGLPGLPGDKGHRGERGPQGPPGPPGDDGMRGEDGEIGPRGLPGEAGMAGVDGPPGPKGNMGPQGEPGPPGQQGNPGPQGLPGPQGPIGPPGEKVSFSFSLFYKKVIKFACDKRFVGRHDERKVVKLSLPLYLIYE

SEQ ID NO: 579 - protein, 273 aa, Homo sapiens [sequence omitted]

SEQ ID NO: 580 - protein, 159 aa, Homo sapiens
MHTVVSWSDDMFLPILIVFLSTWTHSSLAQGWVISTPCCCCSDLHPGPAWSHSENALLSHGQALRALPAWPSQRRPESLGPKQRGRTGLRVLAPCSLHTWGSTLAFPGSLCDFRAGPLGPLGLIIFICNRAMPLPCLVVLRSSCLCKQLVQCQHEMGGP

SEQ ID NO: 581 - protein, 398 aa, Homo sapiens
MALFGALFLALLAGAHAEFPGCKIRVTSKALELVKQEGLRFLEQELETITIPDLRGKEGHFYYNISEKVYDFLSTFITSGMRFLLNQQICPVLYHAGTVLLNSLLDTVPVRSSVDELVGIDYSLMKDPVASTSNLDMDFRGAFFPLTERNWSLPNRAVEPQLQEEERMVYVAFSEFFFDSAMESYFRAGALQLLLVGDKVPHDLDMLLRATYFGSIVLLSPAVIDSPLKLELRVLAPPRCTIKPSGTTISVTASVTIALVPPDQPEVQLSSMTMDARLSAKMALRGKALRTQLDLRRFRIYSNHSALESLALIPLQAPLKTMLQIGVMPMLNERTWRGVQIPLPEGINFVHEVVTNHAGFLTIGADLHFAKGLREVIEKNRPADVRASTAPTPSTAAV

SEQ ID NO: 582 - protein, 432 aa, Homo sapiens [sequence omitted]

SEQ ID NO: 583 - protein, 52 aa, Homo sapiens
MALFGALFLALLAGAHAEFPGRGCAFWSKSWRLSPFRTCGAKKATSTTTSLR

SEQ ID NO: 584 - protein, 98 aa, Homo sapiens
MALFGALFLALLAGAHAEFPGCKIRVTSKALELVKQEGLRFLEQELETITIPDLRGKEGHFYYNISEPGLERGADKFPVVGGSSLFLALDLTLRPPVG

SEQ ID NO: 585 - protein, 200 aa, Homo sapiens
MALFGALFLALLAGAHAEFPGCKIRVTSKALELVKQEGLRFLEQELETITIPDLRGKEGHFYYNISEVKVTELQLTSSELDFQPQQELMLQITNASLGLRFRRQLLYWFFYDGGYINASAEGVSIRTGLELSRDPAGRMKVSNVSCQASVSRMHAAFGGTFKKVYDFLSTFITSGMRFLLNQQVWAATGRRVARVGMLSL

SEQ ID NO: 586 - protein, 217 aa, Homo sapiens
MALFGALFLALLAGAHAEFPGCKIRVTSKALELVKQEGLRFLEQELETITIPDLRGKEGHFYYNISEVKVTELQLTSSELDFQPQQELMLQITNASLGLRFRRQLLYWFFYDGGYINASAEGVSIRTGLELSRDPAGRMKVSNVSCQASVSRMHAAFGGTFKKVYDFLSTFITSGMRFLLNQQICPVLYHAGTVLLNSLLDTVPVLWTSLLALTIPS

SEQ ID NO: 587 - protein, 148 aa, Homo sapiens
MALFGALFLALLAGAHAEFPGCKIRVTSKALELVKQEGLRFLEQELETITIPDLRGKEGHFYYNISEVKVTELQLTSSELDFQPQQELMLQITNASLGLRFRRQLLYWFLKVYDFLSTFITSGMRFLLNQQVWAATGRRVARVGMLSL

SEQ ID NO: 588 - protein, 356 aa, Homo sapiens
MLARAARGTGALLLRGSLLASGRAPRRASSGLPRNTVVLFVPQQEAWVVERMGRFHRILEPGLNILIPVLDRIRYVQSLKEIVINVPEQSAVTLDNVTLQIDGVLYLRIMDPYKASYGVEDPEYAVTQLAQTTMRSELGKLSLDKVFRERESLNASIVDAINQAADCWGIRCLRYEIKDIHVPPRVKESMQMQVEAERRKRATVLESEGTRESAINVAEGKKQAQILASEAEKAEQINQAAGEASAVLAKAKAKAEAIRILAAALTQHNGDAAASLTVAEQYVSAFSKLAKDSNTILLPSNPGDVTSMVAQAMGVYGALTKAPVPGTPDSLSSGSSRDVQGTDASLDEELDRVKMS

SEQ ID NO: 589 - protein, 315 aa, Homo sapiens
MLARAARGTGALLLRGSLLASGRAPRRASSGLPRNTVVLFVPQQEAWVVERMGRFHRILEPGLNILIPVLDRIRYVQSLKEIVINVPEQSAVTLDNVTLQIDGVLYLRIMDPYKASYGVEDPEYAVTQLAQTTMRSELGKLSLDKVFRERESLNASIVDAINQAADCWGIRCLRYEIKDIHVPPRVKESMQMQVEAERRKRATVLESEGTRESAINVAEGKKQAQILASEAEKAEQINQAAGEASAVLAKAKAKAEAIRILAAALTQHNGDAAASLTVAEQYVSAFSKLAKDSNTILLPSNPGDVTSMVAQVRAL

SEQ ID NO: 590 - protein, 290 aa, Homo sapiens
MLARAARGTGALLLRGSLLASGRAPRRASSGLPRNTVVLFVPQQEAWVVERMGRFHRILEPGLNILIPVLDRIRYVQSLKEIVINVPEQSAVTLDNVTLQIDGVLYLRIMDPYKASYGVEDPEYAVTQLAQTTMRSELGKLSLDKVFRERESLNASIVDAINQAADCWGIRCLRYEIKDIHVPPRVKESMQMQVEAERRKRATVLESEGTRESAINVAEGKKQAQILASEAEKAEQINQAAGEASAVLAKAKAKAEAIRILAAALTQHVRGPWVGMGTGIDSGRGSLIYA

SEQ ID NO: 591 - protein, 397 aa, Homo sapiens
MLARAARGTGALLLRGSLLASGRAPRRASSGLPRNTVVLFVPQQEAWVVERMGRFHRILEPGLNILIPVLDRIRYVQSLKEIVINVPEQSAVTLDNVTLQIDGVLYLRIMDPYKASYGVEDPEYAVTQLAQTTMRSELGKLSLDKVFRERESLNASIVDAINQAADCWGIRCLRYEIKDIHVPPRVKESMQMQVEAERRKRATVLESEGTRESAINVAEGKKQAQILASEAEKAEQINQAAGQERVEAEGGARHGPLKIGAGAGSLGYFDFMGQASSVPSLAGEASAVLAKAKAKAEAIRILAAALTQHNGDAAASLTVAEQYVSAFSKLAKDSNTILLPSNPGDVTSMVAQAMGVYGALTKAPVPGTPDSLSSGSSRDVQGTDASLDEELDRVKMS

SEQ ID NO: 592 - protein, 313 aa, Homo sapiens
MLARAARGTGALLLRGSLLASGRAPRRASSGLPRNTVVLFVPQQEAWVVERMGRFHRILEPGLNILIPVLDRIRYVQSLKEIVINVPEQSAVTLDNVTLQIDGVLYLRIMDPYKASYGVEDPEYAVTQLAQTTMRSELGKLSLDKVFRERESLNASIVDAINQAADCWGIRCLRYEIKDIHVPPRVKESMQMQVEAERRKRATVLESEGTRESAINVAEGKKQAQILASEAEKAEQINQAAGEASAVLAKAKAKAEAIRILAAALTQHAMGVYGALTKAPVPGTPDSLSSGSSRDVQGTDASLDEELDRVKMS

SEQ ID NO: 593 - protein, 331 aa, Homo sapiens
MLARAARGTGALLLRGSLLASGRAPRRASSGLPRNTVVLFVPQQEAWVVERMGRFHRILEPGLNILIPVLDRIRYVQSLKEIVINVPEQSAVTLDNVTLQIDGVLYLRIMDPYKASYGVEDPEYAVTQLAQTTMRSELGKLSLDKVFRERESLNASIVDAINQAADCWGIRCLRYEIKDIHVPPRVKESMQMQVEAERRKRATVLESEGTRESAINVAEGKKQAQILASEAEKAEQINQAAGQERVEAEGGARHGPLKIGAGAGSLGYFDFMGQASSVPSLAGEASAVLAKAKAKAEAIRILAAALTQHVRGPWVGMGTGIDSGRGSLIYA

SEQ ID NO: 594 - protein, 183 aa, Homo sapiens
MLARAARGTGALLLRGSLLASGRAPRRASSGLPRNTVVLFVPQQEAWVVERMGRFHRILEPGLNILIPVLDRIRYVQSLKEIVINVPEQSAVTLDNVTLQIDGVLYLRIMDPYKASYGVEDPEYAVTQLAQTTMRSELGKLSLDKVFRVSRSEPELGFEDTNLTLLIFSEGQDQSQALLSVGP

SEQ ID NO: 595 - protein, 220 aa, Homo sapiens
MLARAARGTGALLLRGSLLASGRAPRRASSGLPRNTVVLFVPQQEAWVVERMGRFHRILEPGLNILIPVLDRIRYVQSLKEIVINVPEQSAVTLDNVTLQIDGVLYLRIMDPYKASYGVEDPEYAVTQLAQTTMRSELGKLSLDKVFRERESLNASIVDAINQAADCWGIRCLRYEIKDIHVPPRVKESMQMQVGAKEGWEKGLRAPVPGGSRLPSCYDG

SEQ ID NO: 596 - protein, 311 aa, Homo sapiens
MLARAARGTGALLLRGSLLASGRAPRRASSGLPRNTVVLFVPQQEAWVVERMGRFHRILEPGLNILIPVLDRIRYVQSLKEIVINVPEQSAVTLDNVTLQIDGVLYLRIMDPYKASYGVEDPEYAVTQLAQTTMRSELGKLSLDKVFRVEAERRKRATVLESEGTRESAINVAEGKKQAQILASEAEKAEQINQAAGEASAVLAKAKAKAEAIRILAAALTQHNGDAAASLTVAEQYVSAFSKLAKDSNTILLPSNPGDVTSMVAQAMGVYGALTKAPVPGTPDSLSSGSSRDVQGTDASLDEELDRVKMS

SEQ ID NO: 597 - protein, 205 aa, Homo sapiens
MLARAARGTGALLLRGSLLASGRAPRRASSGLPRNTVVLFVPQQEAWVVERMGRFHRILEPGLNILIPVLDRIRYVQSLKEIVINVPEQSAVTLDNVTLQIDGVLYLRIMDPYKASYGVEDPEYAVTQLAQTTMRSELGKLSLDKVFRERESLNASIVAQAMGVYGALTKAPVPGTPDSLSSGSSRDVQGTDASLDEELDRVKMS

SEQ ID NO: 598 - protein, 161 aa, Homo sapiens
MLARAARGTGALLLRGSLLASGRAPRRASSGLPRNTVVLFVPQQEAWVVERMGRFHRILEPGLNILIPVLDRIRYVQSLKEIVINVPEQSAVTLDNVTLQIDGVLYLRIMDPYKASYGVEDPEYAVTQLAQTTMRSELGKLSSRLTLQWEQQRCPGYRCKS

SEQ ID NO: 599 - protein, 60 aa, Homo sapiens
MLARAARGTGALLLRVRARQPFQRVRTEITWVLRWKRAKFQLLERTGVRGHGPHVILRGS

SEQ ID NO: 600 - protein, 102 aa, Homo sapiens
MLARAARGTGALLLRGSLLASGRAPRRASSGLPRNTVVLFVPQQEAWVVERMGRFHRILEPVRNLFCPPWASQMTNPSRHAMSGGLPLGLPALLAPDSVGQT

SEQ ID NO: 601 - protein, 72 aa, Homo sapiens
MLARAARGTGALLLRGSLLASGRAPRRASSGLPRNTVVLFVPQQEAWVVERMGRFHRILEPELLLFWACSMC

SEQ ID NO: 602 - protein, 111 aa, Homo sapiens
MLARAARGTGALLLRGSLLASGRAPRRASSGLPRNTVVLFVPQQEAWVVERMGRFHRILEPGLNILIPVLDRIRYVQSLKEIVINVPEQSAVTLGTGVPECQHCGCHQPSC

SEQ ID NO: 603 - protein, 112 aa, Homo sapiens
MYAQALLVVGVLQRQAAAQHLHEHPPKLLRGHRVQERVDDRAEVEKRLREGEEDHVRPEVGPRPVVLGFGRSHDPPNLVGHPAYGQCHNNQPWADTSRRERQRKEKHSMRTQ

SEQ ID NO: 604 - protein, 222 aa, Homo sapiens
MWVLGIAATFCGLFLLPGFALQIQCYQCEEFQLNNDCSSPEFIVNCTVNVQDMCQKEVMEQSAGIMYRKSCASSAACLIASAGSPCRGLAPGREEQRALHKAGAVGGGVRMYAQALLVVGVLQRQAAAQHLHEHPPKLLRGHRVQERVDDRAEVEKRLREGEEDHVRPEVGPRPVVLGFGRSHDPPNLVGHPAYGQCHNNQPWADTSRRERQRKEKHSMRTQ

SEQ ID NO: 605 - protein, 93 aa, Homo sapiens
MWVLGIAATFCGLFLLPGFALQIQCYQCEEFQLNNDCSSPEFIVNCTVNVQDMCQKEVMEQSAGSHCVTRLECSGTISAHCNLCLPGSNDHPT

SEQ ID NO: 606 - protein, 84 aa, Homo sapiens
MWVLGIAATFCGLFLLPGFALQIQCYQCEEFQLNNDCSSPEFIVNCTVNVQDMCQKEVMEQSADTKRTNTLLFEMRHFAKQLTT

SEQ ID NO: 607 - protein, 90 aa, Homo sapiens
MWVLGIAATFCGLFLLPGFALQIQCYQCEEFQLNNDCSSPEFIVNCTVNVQDMCQKEVMEQSADRVSLCHEAGVQWNNFSTLQPLPPRLK

SEQ ID NO: 608 - protein, 214 aa, Homo sapiens
MRLLPRLLLLLLLVFPATVLFRGGPRGLLAVAQDLTEDEETVEDSIIEDEDDEAEVEEDEPTDLVEDKEEEDVSGEPEASPSADTTILFVKGEDFPANNIVKFLVGFTNKGTEDFIVESLDASFRYPQDYQFYIQNFTALPLNTVVPPQRQATFEYSFIPAEPMGGRPFGLVINLNYKDLNGNVFQDAVFNQTVTVIEREDGLDGETVRDPYRK

SEQ ID NO: 609 - protein, 207 aa, Homo sapiens
MRLLPRLLLLLLLVFPATVLFRGGPRGLLAVAQDLTEDEETVEDSIIEDEDDEAEVEEDEPTDLVEDKEEEDVSGEPEASPSADTTILFVKGEDFPANNIVKFLVGFTNKGTEDFIVESLDASFRYPQDYQFYIQNFTALPLNTVVPPQRQATFEYSFIPAEPMGGRPFGLVINLNYKDLNGNVFQDAVFNQTVTVIEREDGLDGET

SEQ ID NO: 610 - protein, 192 aa, Homo sapiens
MRLLPRLLLLLLLVFPATVLFRGGPRGLLAVAQDLTEDEETVEDSIIEDEDDEAEVEEDEPTDLVEDKEEEDVSGEPEASPSADTTILFVKGEDFPANNIVKFLVGFTNKGTEDFIVESLDASFRYPQDYQFYIQNFTALPLNTVVPPQRQATFEYSFIPAEPMGGRPFGLVINLNYKDLNVRSSKPSFCLS

SEQ ID NO: 611 - protein, 104 aa, Homo sapiens
MRLLPRLLLLLLLVFPATVLFRGGPRGLLAVAQDLTEDEETVEDSIIEDEDDEAEVEEDEPTDLVEDKEEEDVSGEPEASPSADTTILFVKGEGNTEVLVLIQM

SEQ ID NO: 612 - DNA, 94 bp, Artificial
  Synthetic oligonucleotide
tgacactggcaaaacaatgcagactttgctttccttggtcaggcagtataatccaaagatggtcaaggtcgcaagcttgctggtgaaaaggacc

SEQ ID NO: 613 - DNA, 20 bp, Artificial
  Synthetic oligonucleotide
gaggccgtcaccaagaacat

SEQ ID NO: 614 - DNA, 19 bp, Artificial
  Synthetic oligonucleotide
ggacagccggtcagagctc

SEQ ID NO: 615 - DNA, 111 bp, Artificial
  Synthetic oligonucleotide
gaggccgtcaccaagaacattcacgagtcctgcatgagccagataggctggaaccgcatcatcgtggagaagcccttcgggagggacctgcagagctctgaccggctgtcc

SEQ ID NO: 616 - protein, 1055 aa, Homo sapiens
MALRRLGAALLLLPLLAAVEETLMDSTTATAELGWMVHPPSGWEEVSGYDENMNTIRTYQVCNVFESSQNNWLRTKFIRRRGAHRIHVEMKFSVRDCSSIPSVPGSCKETFNLYYYEADFDSATKTFPNWMENPWVKVDTIAADESFSQVDLGGRVMKINTEVRSFGPVSRSGFYLAFQDYGGCMSLIAVRVFYRKCPRIIQNGAIFQETLSGAESTSLVAARGSCIANAEEVDVPIKLYCNGDGEWLVPIGRCMCKAGFEAVENGTVCRGCPSGTFKANQGDEACTHCPINSRTTSEGATNCVCRNGYYRADLDPLDMPCTTIPSAPQAVISSVNETSLMLEWTPPRDSGGREDLVYNIICKSCGSGRGACTRCGDNVQYAPRQLGLTEPRIYISDLLAHTQYTFEIQAVNGVTDQSPFSPQFASVNITTNQAAPSAVSIMHQVSRTVDSITLSWSQPDQPNGVILDYELQYYEKELSEYNATAIKSPTNTVTVQGLKAGAIYVFQVRARTVAGYGRYSGKMYFQTMTEAEYQTSIQEKLPLIIGSSAAGLVFLIAVVVIAIVCNRRGFERADSEYTDKLQHYTSGHMTPGMKIYIDPFTYEDPNEAVREFAKEIDISCVKIEQVIGAGEFGEVCSGHLKLPGKREIFVAIKTLKSGYTEKQRRDFLSEASIMGQFDHPNVIHLEGVVTKSTPVMIITEFMENGSLDSFLRQNDGQFTVIQLVGMLRGIAAGMKYLADMNYVHRDLAARNILVNSNLVCKVSDFGLSRFLEDDTSDPTYTSALGGKIPIRWTAPEAIQYRKFTSASDVWSYGIVMWEVMSYGERPYWDMTNQDVINAIEQDYRLPPPMDCPSALHQLMLDCWQKDRNHRPKFGQIVNTLDKMIRNPNSLKAMAPLSSGINLPLLDRTIPDYTSFNTVDEWLEAIKMGQYKESFANAGFTSFDVVSQMMMEDILRLGVTLAGHQKKILNSIQVMRAQMNQIQSVEGQPLARRPRATGRTKRCQPRDVTKKTCNSNDGKKKGMGKKKTDPGRGREIQGIFFKEDSHKESNDCSCGG

SEQ ID NO: 617 - protein, 344 aa, Homo sapiens
MGPPSAPPCRLHVPWKEVLLTASLLTFWNPPTTAKLTIESTPFNVAEGKEVLLLAHNLPQNRIGYSWYKGERVDGNSLIVGYVIGTQQATPGPAYSGRETIYPNASLLIQNVTQNDTGFYTLQVIKSDLVNEEATGQFHVYPELPKPSISSNNSNPVEDKDAVAFTCEPEVQNTTYLWWVNGQSLPVSPRLQLSNGNMTLTLLSVKRNDAGSYECEIQNPASANRSDPVTLNVLYGPDVPTISPSKANYRPGENLNLSCHAASNPPAQYSWFINGTFQQSTQELFIPNITVNNSGSYMCQAHNSATGLNRTTVTMITVSGSAPVLSAVATVGITIGVLARVALI

SEQ ID NO: 618 - protein, 114 aa, Homo sapiens
MSLLSSRAARVPGPSSSLCALLVLLLLLTQPGPIASAGPAAAVLRELRCVCLQTTQGVHPKMISNLQVFAIGPQCSKVEVVASLKNGKEICLDPEAPFLKKVIQKILDGGNKEN

SEQ ID NO: 619 - protein, 107 aa, Homo sapiens
MAHATLSAAPSNPRLLRVALLLLLLVAASRRAAGASVVTELRCQCLQTLQGIHLKNIQSVNVRSPGPHCAQTEVIATLKNGKKACLNPASPMVQKIIEKILNKGSTN

SEQ ID NO: 620 - protein, 461 aa, Homo sapiens
MNNFGNEEFDCHFLDEGFTAKDILDQKINEVSSSDDKDAFYVADLGDILKKHLRWLKALPRVTPFYAVKCNDSKAIVKTLAATGTGFDCASKTEIQLVQSLGVPPERIIYANPCKQVSQIKYAANNGVQMMTFDSEVELMKVARAHPKAKLVLRIATDDSKAVCRLSVKFGATLRTSRLLLERAKELNIDVVGVSFHVGSGCTDPETFVQAISDARCVFDMGAEVGFSMYLLDIGGGFPGSEDVKLKFEEITGVINPALDKYFPSDSGVRIIAEPGRYYVASAFTLAVNIIAKKIVLKEQTGSDDEDESSEQTFMYYVNDGVYGSFNCILYDHAHVKPLLQKRPKPDEKYYSSSIWGPTCDGLDRIVERCDLPEMHVGDWMLFENMGAYTVAAASTFNGFQRPTIYYVMSGPAWQLMQQFQNPDFPPEVEEQDASTLPVSCAWESGMKRHRAACASASINV

SEQ ID NO: 621 - protein, 214 aa, Homo sapiens
MGAAHSASEEVRELEGKTGFSSDQIEQLHRRFKQLSGDQPTIRKENFNNVPDLELNPIRSKIVRAFFDNRNLRKGPSGLADEINFEDFLTIMSYFRPIDTTMDEEQVELSRKEKLRFLFHMYDSDSDGRITLEEYRNVVEELLSGNPHIEKESARSIADGAMMEAASVCMGQMEPDQVYEGITFEDFLKIWQGIDIETKMHVRFLNMETMALCH

SEQ ID NO: 622 - protein, 280 aa, Homo sapiens
MSESFDCAKCNESLYGRKYIQTDSGPYCVPCYDNTFANTCAECQQLIGHDSRELFYEDRHFHEGCFRCCRCQRSLADEPFTRQDSELLCNDCYCSAFSSQCSACGETVMPGSRKLEYGGQTWHEHCFLCIGCEQPLGSRPFVPDKGAHYCVPCYENNFAPRCARCTKTLTQGGLTYRDLPWHPKCLVCTGCQTPLAGQQFTSRDEDPYCVACFGELFAPKCSSCKRPIVGLGGGKYVSFEDRHWHHNCFTCDRCSNSLVGQGFVPDGDQVLCQGCSQAGP

SEQ ID NO: 623 - protein, 132 aa, Homo sapiens
VDAFLGTWKLVDSKNFDDYMKSLGVGFATRQVASMTKPTTIIEKNGDILTLKTHSTFKNTEISFKLGVEFDETTADDRKVKSIVTLDGGKLVHLQKWDGQETTLVRELIDGKLILTLTHGTAVCTRTYEKEA

SEQ ID NO: 624 - protein, 446 aa, Homo sapiens
MLLPQLCWLPLLAGLLPPVPAQKFSALTFLRVDQDKDKDCSLDCAGSPQKPLCASDGRTFLSRCEFQRAKCKDPQLEIAYRGNCKDVSRCVAERKYTQEQARKEFQQVFIPECNDDGTYSQVQCHSYTGYCWCVTPNGRPISGTAVAHKTPRCPGSVNEKLPQREGTGKTDDAAAPALETQPQGDEEDIASRYPTLWTEQVKSRQNKTNKNSVSSCDQEHQSALEEAKQPKNDNVVIPECAHGGLYKPVQCHPSTGYCWCVLVDTGRPIPGTSTRYEQPKCDNTARAHPAKARDLYKGRQLQGCPGAKKHEFLTSVLDALSTDMVHAASDPSSSSGRLSEPDPSHTLEERVVHWYFKLLDKNSSGDIGKKEIKPFKRFLRKKSKPKKCVKKFVEYCDVNNDKSISVQELMGCLGVAKEDGKADTKKRHTPRGHAESTSNRQPRKQG

SEQ ID NO: 625 - protein, 132 aa, Homo sapiens
MKSSGLFPFLVLLALGTLAPWAVEGSGKSFKAGVCPPKKSAQCLRYKKPECQSDWQCPGKKRCCPDTCGIKCLDPVDTPNPTRRKPGKCPVTYGQCLMLNPPNFCEMDGQCKRDLKCCMGMCGKSCVSPVKA

SEQ ID NO: 626 - protein, 2224 aa, Homo sapiens
MFPGCPRLWVLVVLGTSWVGWGSQGTEAAQLRQFYVAAQGISWSYRPEPTNSSLNLSVTSFKKIVYREYEPYFKKEKPQSTISGLLGPTLYAEVGDIIKVHFKNKADKPLSIHPQGIRYSKLSEGASYLDHTFPAEKMDDAVAPGREYTYEWSISEDSGPTHDDPPCLTHIYYSHENLIEDFNSGLIGPLLICKKGTLTEGGTQKTFDKQIVLLFAVFDESKSWSQSSSLMYTVNGYVNGTMPDITVCAHDHISWHLLGMSSGPELFSIHFNGQVLEQNHHKVSAITLVSATSTTANMTVGPEGKWIISSLTPKHLQAGMQAYIDIKNCPKKTRNLKKITREQRRHMKRWEYFIAAEEVIWDYAPVIPANMDKKYRSQHLDNFSNQIGKHYKKVMYTQYEDESFTKHTVNPNMKEDGILGPIIRAQVRDTLKIVFKNMASRPYSIYPHGVTFSPYEDEVNSSFTSGRNNTMIRAVQPGETYTYKWNILEFDEPTENDAQCLTRPYYSDVDIMRDIASGLIGLLLICKSRSLDRRGIQRAADIEQQAVFAVFDENKSWYLEDNINKFCENPDEVKRDDPKFYESNIMSTINGYVPESITTLGFCFDDTVQWHFCSVGTQNEILTIHFTGHSFIYGKRHEDTLTLFPMRGESVTVTMDNVGTWMLTSMNSSPRSKKLRLKFRDVKCIPDDDEDSYEIFEPPESTVMATRKMHDRLEPEDEESDADYDYQNRLAAALGIRSFRNSSLNQEEEEFNLTALALENGTEFVSSNTDIIVGSNYSSPSNISKFTVNNLAEPQKAPSHQQATTAGSPLRHLIGKNSVLNSSTAEHSSPYSEDPIEDPLQPDVTGIRLLSLGAGEFKSQEHAKHKGPKVERDQAAKHRFSWMKLLAHKVGRHLSQDTGSPSGMRPWEDLPSQDTGSPSRMRPWKDPPSDLLLLKQSNSSKILVGRWHLASEKGSYEIIQDTDEDTAVNNWLISPQNASRAWGESTPLANKPGKQSGHPKFPRVRHKSLQVRQDGGKSRLKKSQFLIKTRKKKKEKHTHHAPLSPRTFHPLRSEAYNTFSERRLKHSLVLHKSNETSLPTDLNQTLPSMDFGWIASLPDHNQNSSNDTGQASCPPGLYQTVPPEEHYQTFPIQDPDQMHSTSDPSHRSSSPELSEMLEYDRSHKSFPTDISQMSPSSEHEVWQTVISPDLSQVTLSPELSQTNLSPDLSHTTLSPELIQRNLSPALGQMPISPDLSHTTLSPDLSHTTLSLDLSQTNLSPELSQTNLSPALGQMPLSPDLSHTTLSLDFSQTNLSPELSHMTLSPELSQTNLSPALGQMPISPDLSHTTLSLDFSQTNLSPELSQTNLSPALGQMPLSPDPSHTTLSLDLSQTNLSPELSQTNLSPDLSEMPLFADLSQIPLTPDLDQMTLSPDLGETDLSPNFGQMSLSPDLSQVTLSPDISDTTLLPDLSQISPPPDLDQIFYPSESSQSLLLQEFNESFPYPDLGQMPSPSSPTLNDTFLSKEFNPLVIVGLSKDGTDYIEIIPKEEVQSSEDDYAEIDYVPYDDPYKTDVRTNINSSRDPDNIAAWYLRSNNGNRRNYYIAAEEISWDYSEFVQRETDIEDSDDIPEDTTYKKVVFRKYLDSTFTKRDPRGEYEEHLGILGPIIRAEVDDVIQVRFKNLASRPYSLHAHGLSYEKSSEGKTYEDDSPEWFKEDNAVQPNSSYTYVWHATERSGPESPGSACRAWAYYSAVNPEKDIHSGLIGPLLICQKGILHKDSNMPVDMREFVLLFMTFDEKKSWYYEKKSRSSWRLTSSEMKKSHEFHAINGMIYSLPGLKMYEQEWVRLHLLNIGGSQDIHVVHFHGQTLLENGNKQHQLGVWPLLPGSFKTLEMKASKPGWWLLNTEVGENQRAGMQTPFLIMDRDCRMPMGLSTGIISDSQIKASEFLGYWEPRLARLNNGGSYNAWSVEKLAAEFASKPWIQVDMQKEVIITGIQTQGAKHYLKSCYTTEFYVAYSSNQINWQIFKGNSTRNVMYFNGNSDASTIKENQFDPPIVARYIRISPTRAYNRPTLRLELQGCEVNGCSTPLGMENGKIENKQITASSFKKSWWGDYWEPFRARLNAQGRVNAWQAKANNNKQWLEIDLLKIKKITAIITQGCKSLSSEMYVKSYTIHYSEQGVEWKPYRLKSSMVDKIFEGNTNTKGHVKNFFNPPIISRFIRVIPKTWNQSITLRLELFGCDIY

SEQ ID NO: 627 - protein, 2224 aa, Homo sapiens
MFPGCPRLWVLVVLGTSWVGWGSQGTEAAQLRQFYVAAQGISWSYRPEPTNSSLNLSVTSFKKIVYREYEPYFKKEKPQSTISGLLGPTLYAEVGDIIKVHFKNKADKPLSIHPQGIRYSKLSEGASYLDHTFPAEKMDDAVAPGREYTYEWSISEDSGPTHDDPPCLTHIYYSHENLIEDFNSGLIGPLLICKKGTLTEGGTQKTFDKQIVLLFAVFDESKSWSQSSSLMYTVNGYVNGTMPDITVCAHDHISWHLLGMSSGPELFSIHFNGQVLEQNHHKVSAITLVSATSTTANMTVGPEGKWIISSLTPKHLQAGMQAYIDIKNCPKKTRNLKKITREQRRHMKRWEYFIAAEEVIWDYAPVIPANMDKKYRSQHLDNFSNQIGKHYKKVMYTQYEDESFTKHTVNPNMKEDGILGPIIRAQVRDTLKIVFKNMASRPYSIYPHGVTFSPYEDEVNSSFTSGRNNTMIRAVQPGETYTYKWNILEFDEPTENDAQCLTRPYYSDVDIMRDIASGLIGLLLICKSRSLDRRGIQRAADIEQQAVFAVFDENKSWYLEDNINKFCENPDEVKRDDPKFYESNIMSTINGYVPESITTLGFCFDDTVQWHFCSVGTQNEILTIHFTGHSFIYGKRHEDTLTLFPMRGESVTVTMDNVGTWMLTSMNSSPRSKKLRLKFRDVKCIPDDDEDSYEIFEPPESTVMATRKMHDRLEPEDEESDADYDYQNRLAAALGIRSFRNSSLNQEEEEFNLTALALENGTEFVSSNTDIIVGSNYSSPSNISKFTVNNLAEPQKAPSHQQATTAGSPLRHLIGKNSVLNSSTAEHSSPYSEDPIEDPLQPDVTGIRLLSLGAGEFRSQEHAKRKGPKVERDQAAKHRFSWMKLLAHKVGRHLSQDTGSPSGMRPWEDLPSQDTGSPSRMRPWKDPPSDLLLLKQSNSSKILVGRWHLASEKGSYEIIQDTDEDTAVNNWLISPQNASRAWGESTPLANKPGKQSGHPKFPRVRHKSLQVRQDGGKSRLKKSQFLIKTRKKKKEKHTHHAPLSPRTFHPLRSEAYNTFSERRLKHSLVLHKSNETSLPTDLNQTLPSMDFGWIASLPDHNQNSSNDTGQASCPPGLYQTVPPEEHYQTFPIQDPDQMHSTSDPSHRSSSPELSEMLEYDRSHKSFPTDISQMSPSSEHEVWQTVISPDLSQVTLSPELSQTNLSPDLSHTTLSPELIQRNLSPALGQMPISPDLSHTTLSPDLSHTTLSLDLSQTNLSPELSQTNLSPALGQMPLSPDLSHTTLSLDFSQTNLSPELSHMTLSPELSQTNLSPALGQMPISPDLSHTTLSLDFSQTNLSPELSQTNLSPALGQMPLSPDPSHTTLSLDLSQTNLSPELSQTNLSPDLSEMPLFADLSQIPLTPDLDQMTLSPDLGETDLSPNFGQMSLSPDLSQVTLSPDISDTTLLPDLSQISPPPDLDQIFYPSESSQSLLLQEFNESFPYPDLGQMPSPSSPTLNDTFLSKEFNPLVIVGLSKDGTDYIEIIPKEEVQSSEDDYAEIDYVPYDDPYKTDVRTNINSSRDPDNIAAWYLRSNNGNRRNYYIAAEEISWDYSEFVQRETDIEDSDDIPEDTTYKKVVFRKYLDSTFTKRDPRGEYEEHLGILGPIIRAEVDDVIQVRFKNLASRPYSLHAHGLSYEKSSEGKTYEDDSPEWFKEDNAVQPNSSYTYVWHATERSGPESPGSACRAWAYYSAVNPEKDIHSGLIGPLLICQKGILHKDSNMPVDMREFVLLFMTFDEKKSWYYEKKSRSSWRLTSSEMKKSHEFHAINGMIYSLPGLKMYEQEWVRLHLLNIGGSQDIHVVHFHGQTLLENGNKQHQLGVWPLLPGSFKTLEMKASKPGWWLLNTEVGENQRAGMQTPFLIMDRDCRMPMGLSTGIISDSQIKASEFLGYWEPRLARLNNGGSYNAWSVEKLAAEFASKPWIQVDMQKEVIITGIQTQGAKHYLKSCYTTEFYVAYSSNQINWQIFKGNSTRNVMYFNGNSDASTIKENQFDPPIVARYIRISPTRAYNRPTLRLELQGCEVNGCSTPLGMENGKIENKQITASSFKKSWWGDYWEPFRARLNAQGRVNAWQAKANNNKQWLEIDLLKIKKITAIITQGCKSLSSEMYVKSYTIHYSEQGVEWKPYRLKSSMVDKIFEGNTNTKGHVKNFFNPPIISRFIRVIPKTWNQSITLRLELFGCDIY

SEQ ID NO: 628 - protein, 1880 aa, Homo sapiens
PYSVGFREADAATSFLRAARSGNLDKALDHLRNGVDINTCNQNGLNGLHLASKEGHVKMVVELLHKEIILETTTKKGNTALHIAALAGQDEVVRELVNYGANVNAQSQKGFTPLYMAAQENHLEVVKFLLENGANQNVATEDGFTPLAVALQQGHENVVAHLINYGTKGKVRLPALHIAARNDDTRTAAVLLQNDPNPDVLSKTGFTPLHIAAHYENLNVAQLLLNRGASVNFTPQNGITPLHIASRRGNVIMVRLLLDRGAQIETKTKDELTPLHCAARNGHVRISEILLDHGAPIQAKTKNGLSPIHMAAQGDHLDCVRLLLQYDAEIDDITLDHLTPLHVAAHCGHHRVAKVLLDKGAKPNSRALNGFTPLHIACKKNHVRVMELLLKTGASIDAVTESGLTPLHVASFMGHLPIVKNLLQRGASPNVSNVKVETPLHMAARAGHTEVAKYLLQNKAKVNAKAKDDQTPLHCAARIGHTNMVKLLLENNANPNLATTAGHTPLHIAAREGHVETVLALLEKEASQACMTKKGFTPLHVAAKYGKVRVAELLLERDAHPNAAGKNGLTPLHVAVHHNNLDIVKLLLPRGGSPHSPAWNGYTPLHIAAKQNQVEVARSLLQYGGSANAESVQGVTPLHLAAQEGHAEMVALLLSKQANGNLGNKSGLTPLHLVAQEGHVPVADVLIKHGVMVDATTRMGYTPLHVASHYGNIKLVKFLLQHQADVNAKTKLGYSPLHQAAQQGHTDIVTLLLKNGASPNEVSSDGTTPLAIAKRLGYISVTDVLKVVTDETSFVLVSDKHRMSFPETVDEILDVSEDEGEELISFKAERRDSRDVDEEKELLDFVPKLDQVVESPAIPRIPCAMPETVVIRSEEQEQASKEYDEDSLIPSSPATETSDNISPVASPVHTGFLVSFMVDARGGSMRGSRHNGLRVVIPPRTCAAPTRITCRLVKPQKLSTPPPLAEEEGLASRIIALGPTGAQFLSPVIVEIPHFASHGRGDRELVVLRSENGSVWKEHRSRYGESYLDQILNGMDEELGSLEELEKKRVCRIITTDFPLYFVIMSRLCQDYDIIGPEGGSLKSKLVPLVQATFPENAVTKRVKLALQAQPVPDELVTKLLGNQATFSPIVTVEPRRRKFHRPIGLRIPLPPSWTDNPRDSGEGDTTSLRLLCSVIGGTDQAQWEDITGTTKLVYANECANFTTNVSARFWLSDCPRTAEAVNFATLLYKELTAVPYMAKFVIFAKMNDPREGRLRCYCMTDDKVDKTLEQHENFVEVARSRDIEVLEGMSLFAELSGNLVPVKKAAQQRSFHFQSFRENRLAMPVKVRDSSREPGGSLSFLRKAMKYEDTQHILCHLNITMPPCAKGSGAEDRRRTPTPLALRYSILSESTPGSLSGTEQAEMKMAVISEHLGLSWAELARELQFSVEDINRIRVENPNSLLEQSVALLNLWVIREGQNANMENLYTALQSIDRGEIVNMLEGSGRQSRNLKPDRRHTDRDYSLSPSQMNGYSSLQDELLSPASLGCALSSPLRADQYWNEVAVLDAIPLAATEHDTMLEMSDMQVWSAGLTPSLVTAEDSSLECSKAEDSDATGHEWKLEGALSEEPRGPELGSLELVEDDTVDSDATNGLIDLLEQEEGQRSEEKLPGSKRQDDATGAGQDSENEVSLVSGHQRGQARITHSPTVSQVTERSQDRLQDWDADGSIVSYLQDAAQGSWQEEVTQGPHSFQGTSTMTEGLEPGGSQEYEKVLVSVSEHTWTEQPEAESSQADRDRRQQGQEEQVQEAKNTFTQVVQGNEFQNIPGEQVTEEQFTDEQGNIVTKKIIRKVVRQIDLSSADAAQEHEEVTVEGPLEDPSELEVDIDYFMKHSKDHTSTPNP

SEQ ID NO: 629 - protein, 1881 aa, Homo sapiens
MPYSVGFREADAATSFLRAARSGNLDKALDHLRNGVDINTCNQNGLNGLHLASKEGHVKMVVELLHKEIILETTTKKGNTALHIAALAGQDEVVRELVNYGANVNAQSQKGFTPLYMAAQENHLEVVKFLLENGANQNVATEDGFTPLAVALQQGHENVVAHLINYGTKGKVRLPALHIAARNDDTRTAAVLLQNDPNPDVLSKTGFTPLHIAAHYENLNVAQLLLNRGASVNFTPQNGITPLHIASRRGNVIMVRLLLDRGAQIETKTKDELTPLHCAARNGHVRISEILLDHGAPIQAKTKNGLSPIHMAAQGDHLDCVRLLLQYDAEIDDITLDHLTPLHVAAHCGHHRVAKVLLDKGAKPNSRALNGFTPLHIACKKNHVRVMELLLKTGASIDAVTESGLTPLHVASFMGHLPIVKNLLQRGASPNVSNVKVETPLHMAARAGHTEVAKYLLQNKAKVNAKAKDDQTPLHCAARIGHTNMVKLLLENNANPNLATTAGHTPLHIAAREGHVETVLALLEKEASQACMTKKGFTPLHVAAKYGKVRVAELLLERDAHPNAAGKNGLTPLHVAVHHNNLDIVKLLLPRGGSPHSPAWNGYTPLHIAAKQNQVEVARSLLQYGGSANAESVQGVTPLHLAAQEGHAEMVALLLSKQANGNLGNKSGLTPLHLVAQEGHVPVADVLIKHGVMVDATTRMGYTPLHVASHYGNIKLVKFLLQHQADVNAKTKLGYSPLHQAAQQGHTDIVTLLLKNGASPNEVSSDGTTPLAIAKRLGYISVTDVLKVVTDETSFVLVSDKHRMSFPETVDEILDVSEDEGEELISFKAERRDSRDVDEEKELLDFVPKLDQVVESPAIPRIPCAMPETVVIRSEEQEQASKEYDEDSLIPSSPATETSDNISPVASPVHTGFLVSFMVDARGGSMRGSRHNGLRVVIPPRTCAAPTRITCRLVKPQKLSTPPPLAEEEGLASRIIALGPTGAQFLSPVIVEIPHFASHGRGDRELVVLRSENGSVWKEHRSRYGESYLDQILNGMDEELGSLEELEKKRVCRIITTDFPLYFVIMSRLCQDYDIIGPEGGSLKSKLVPLVQATFPENAVTKRVKLALQAQPVPDELVTKLLGNQATFSPIVTVEPRRRKFHRPIGLRIPLPPSWTDNPRDSGEGDTTSLRLLCSVIGGTDQAQWEDITGTTKLVYANECANFTTNVSARFWLSDCPRTAEAVNFATLLYKELTAVPYMAKFVIFAKMNDPREGRLRCYCMTDDKVDKTLEQHENFVEVARSRDIEVLEGMSLFAELSGNLVPVKKAAQQRSFHFQSFRENRLAMPVKVRDSSREPGGSLSFLRKAMKYEDTQHILCHLNITMPPCAKGSGAEDRRRTPTPLALRYSILSESTPGSLSGTEQAEMKMAVISEHLGLSWAELARELQFSVEDINRIRVENPNSLLEQSVALLNLWVIREGQNANMENLYTALQSIDRGEIVNMLEGSGRQSRNLKPDRRHTDRDYSLSPSQMNGYSSLQDELLSPASLGCALSSPLRADQYWNEVAVLDAIPLAATEHDTMLEMSDMQVWSAGLTPSLVTAEDSSLECSKAEDSDATGHEWKLEGALSEEPRGPELGSLELVEDDTVDSDATNGLIDLLEQEEGQRSEEKLPGSKRQDDATGAGQDSENEVSLVSGHQRGQARITHSPTVSQVTERSQDRLQDWDADGSIVSYLQDAAQGSWQEEVTQGPHSFQGTSTMTEGLEPGGSQEYEKVLVSVSEHTWTEQPEAESSQADRDRRQQGQEEQVQEAKNTFTQVVQGNEFQNIPGEQVTEEQFTDEQGNIVTKKIIRKVVRQIDLSSADAAQEHEEVTVEGPLEDPSELEVDIDYFMKHSKDHTSTPNP

SEQ ID NO: 630 - protein, 155 aa, Homo sapiens
MWTFVTQLLVTLVLLSFFLVSCQNVMHIVRGSLCFVLKHIHQELDKELGESEDLSDDEETISTRVVRRRVFLKGNEFQNIPGEQVTEEQFTDEQGNIVTKKIIRKVVRQIDLSSADAAQEHEEVELRGSGLQPDLIEGRKGAQIVKRASLKRGKQ

SEQ ID NO: 631 - protein, 131 aa, Homo sapiens
MWTFVTQLLVTLVLLSFFLVSCQNVMHIVRGSLCFVLKHIHQELDKELGESEGLSDDEETISTRVVRRRVFLKGNEFQNIPGEQVTEEQFTDEQGNIVTKKIIRKVVRQIDLSSADAAQEHEEDHTSTPNP

SEQ ID NO: 632 - protein, 464 aa, Homo sapiens
MILANVFCLFFFLDETLRSLASPSSLQGPELHGWRPPVDCVRANELCAAESNCSSRYRTLRQCLAGRDRNTMLANKECQAALEVLQESPLYDCRCKRGMKKELQCLQIYWSIHLGLTEGEEFYEASPYEPVTSRLSDIFRLASIFSGTGADPVVSAKSNHCLDAAKACNLNDNCKKLRSSYISICNREISPTERCNRRKCHKALRQFFDRVPSEYTYRMLFCSCQDQACAERRRQTILPSCSYEDKEKPNCLDLRGVCRTDHLCRSRLADFHANCRASYQTVTSCPADNYQACLGSYAGMIGFDMTPNYVDSSPTGIVVSPWCSCRGSGNMEEECEKFLRDFTENPCLRNAIQAFGNGTDVNVSPKGPSFQATQAPRVEKTPSLPDDLSDSTSLGTSVITTCTSVQEQGLKANNSKELSMCFTELTTNIIPGSNKVIKPNSGPSRARPSAALTVLSVLMLKQAL

SEQ ID NO: 633 - protein, 1806 aa, Homo sapiens
MEPWSSRWKTKRWLWDFTVTTLALTFLFQAREVRGAAPVDVLKALDFHNSPEGISKTTGFCTNRKNSKGSDTAYRVSKQAQLSAPTKQLFPGGTFPEDFSILFTVKPKKGIQSFLLSIYNEHGIQQIGVEVGRSPVFLFEDHTGKPAPEDYPLFRTVNIADGKWHRVAISVEKKTVTMIVDCKKKTTKPLDRSERAIVDTNGITVFGTRILDEEVFEGDIQQFLITGDPKAAYDYCEHYSPDCDSSAPKAAQAQEPQIDEYAPEDIIEYDYEYGEAEYKEAESVTEGPTVTEETIAQTEANIVDDFQEYNYGTMESYQTEAPRHVSGTNEPNPVEEIFTEEYLTGEDYDSQRKNSEDTLYENKEIDGRDSDLLVDGDLGEYDFYEYKEYEDKPTSPPNEEFGPGVPAETDITETSINGHGAYGEKGQKGEPAVVEPGMLVEGPPGPAGPAGIMGPPGLQGPTGPPGDPGDRGPPGRPGLPGADGLPGPPGTMLMLPFRYGGDGSKGPTISAQEAQAQAILQQARIALRGPPGPMGLTGRPGPVGGPGSSGAKGESGDPGPQGPRGVQGPPGPTGKPGKRGRPGADGGRGMPGEPGAKGDRGFDGLPGLPGDKGHRGERGPQGPPGPPGDDGMRGEDGEIGPRGLPGEAGPRGLLGPRGTPGAPGQPGMAGVDGPPGPKGNMGPQGEPGPPGQQGNPGPQGLPGPQGPIGPPGEKGPQGKPGLAGLPGADGPPGHPGKEGQSGEKGALGPPGPQGPIGYPGPRGVKGADGVRGLKGSKGEKGEDGFPGFKGDMGLKGDRGEVGQIGPRGEDGPEGPKGRAGPTGDPGPSGQAGEKGKLGVPGLPGYPGRQGPKGSTGFPGFPGANGEKGARGVAGKPGPRGQRGPTGPRGSRGARGPTGKPGPKGTSGGDGPPGPPGERGPQGPQGPVGFPGPKGPPGPPGKDGLPGHPGQRGETGFQGKTGPPGPGGVVGPQGPTGETGPIGERGYPGPPGPPGEQGLPGAAGKEGAKGDPGPQGISGKDGPAGLRGFPGERGLPGAQGAPGLKGGEGPQGPPGPVGSPGERGSAGTAGPIGLRGRPGPQGPPGPAGEKGAPGEKGPQGPAGRDGVQGPVGLPGPAGPAGSPGEDGDKGEIGEPGQKGSKGGKGENGPPGPPGLQGPVGAPGIAGGDGEPGPRGQQGMFGQKGDEGARGFPGPPGPIGLQGLPGPPGEKGENGDVGPMGPPGPPGPRGPQGPNGADGPQGPPGSVGSVGGVGEKGEPGEAGNPGPPGEAGVGGPKGERGEKGEAGPPGAAGPPGAKGPPGDDGPKGNPGPVGFPGDPGPPGELGPAGQDGVGGDKGEDGDPGQPGPPGPSGEAGPPGPPGKRGPPGAAGAEGRQGEKGAKGEAGAEGPPGKTGPVGPQGPAGKPGPEGLRGIPGPVGEQGLPGAAGQDGPPGPMGPPGLPGLKGDPGSKGEKGHPGLIGLIGPPGEQGEKGDRGLPGTQGSPGAKGDGGIPGPAGPLGPPGPPGLPGPQGPKGNKGSTGPAGQKGDSGLPGPPGPPGPPGEVIQPLPILSSKKTRRHTEGMQADADDNILDYSDGMEEIFGSLNSLKQDIEHMKFPMGTQTNPARTCKDLQLSHPDFPDGEYWIDPNQGCSGDSFKVYCNFTSGGETCIYPDKKSEGVRISSWPKEKPGSWFSEFKRGKLLSYLDVEGNSINMVQMTFLKLLTASARQNFTYHCHQSAAWYDVSSGSYDKALRFLGSNDEEMSYDNNPFIKTLYDGCTSRKGYEKTVIEINTPKIDQVPIVDVMISDFGDQNQKFGFEVGPVCFLG

SEQ ID NO: 634 - protein, 1806 aa, Homo sapiens
MEPWSSRWKTKRWLWDFTVTTLALTFLFQAREVRGAAPVDVLKALDFHNSPEGISKTTGFCTNRKNSKGSDTAYRVSKQAQLSAPTKQLFPGGTFPEDFSILFTVKPKKGIQSFLLSIYNEHGIQQIGVEVGRSPVFLFEDHTGKPAPEDYPLFRTVNIADGKWHRVAISVEKKTVTMIVDCKKKTTKPLDRSERAIVDTNGITVFGTRILDEEVFEGDIQQFLITGDPKAAYDYCEHYSPDCDSSAPKAAQAQEPQIDEYAPEDIIEYDYEYGEAEYKEAESVTEGPTVTEETIAQTEANIVDDFQEYNYGTMESYQTEAPRHVSGTNEPNPVEEIFTEEYLTGEDYDSQRKNSEDTLYENKEIDGRDSDLLVDGDLGEYDFYEYKEYEDKPTSPPNEEFGPGVPAETDITETSINGHGAYGEKGQKGEPAVVEPGMLVEGPPGPAGPAGIMGPPGLQGPTGPPGDPGDRGPPGRPGLPGADGLPGPPGTMLMLPFRYGGDGSKGPTISAQEAQAQAILQQARIALRGPPGPMGLTGRPGPVGGPGSSGAKGESGDPGPQGPRGVQGPPGPTGKPGKRGRPGADGGRGMPGEPGAKGDRGFDGLPGLPGDKGHRGERGPQGPPGPPGDDGMRGEDGEIGPRGLPGEAGPRGLLGPRGTPGAPGQPGMAGVDGPPGPKGNMGPQGEPGPPGQQGNPGPQGLPGPQGPIGPPGEKGPQGKPGLAGLPGADGPPGHPGKEGQSGEKGALGPPGPQGPIGYPGPRGVKGADGVRGLKGSKGEKGEDGFPGFKGDMGLKGDRGEVGQIGPRGEDGPEGPKGRAGPTGDPGPSGQAGEKGKLGVPGLPGYPGRQGPKGSTGFPGFPGANGEKGARGVAGKPGPRGQRGPTGPRGSRGARGPTGKPGPKGTSGGDGPPGPPGERGPQGPQGPVGFPGPKGPPGPPGKDGLPGHPGQRGETGFQGKTGPPGPGGVVGPQGPTGETGPIGERGHPGPPGPPGEQGLPGAAGKEGAKGDPGPQGISGKDGPAGLRGFPGERGLPGAQGAPGLKGGEGPQGPPGPVGSPGERGSAGTAGPIGLRGRPGPQGPPGPAGEKGAPGEKGPQGPAGRDGVQGPVGLPGPAGPAGSPGEDGDKGEIGEPGQKGSKGGKGENGPPGPPGLQGPVGAPGIAGGDGEPGPRGQQGMFGQKGDEGARGFPGPPGPIGLQGLPGPPGEKGENGDVGPMGPPGPPGPRGPQGPNGADGPQGPPGSVGSVGGVGEKGEPGEAGNPGPPGEAGVGGPKGERGEKGEAGPPGAAGPPGAKGPPGDDGPKGNPGPVGFPGDPGPPGELGPAGQDGVGGDKGEDGDPGQPGPPGPSGEAGPPGPPGKRGPPGAAGAEGRQGEKGAKGEAGAEGPPGKTGPVGPQGPAGKPGPEGLRGIPGPVGEQGLPGAAGQDGPPGPMGPPGLPGLKGDPGSKGEKGHPGLIGLIGPPGEQGEKGDRGLPGTQGSPGAKGDGGIPGPAGPLGPPGPPGLPGPQGPKGNKGSTGPAGQKGDSGLPGPPGPPGPPGEVIQPLPILSSKKTRRHTEGMQADADDNILDYSDGMEEIFGSLNSLKQDIEHMKFPMGTQTNPARTCKDLQLSHPDFPDGEYWIDPNQGCSGDSFKVYCNFTSGGETCIYPDKKSEGVRISSWPKEKPGSWFSEFKRGKLLSYLDVEGNSINMVQMTFLKLLTASARQNFTYHCHQSAAWYDVSSGSYDKALRFLGSNDEEMSYDNNPFIKTLYDGCTSRKGYEKTVIEINTPKIDQVPIVDVMISDFGDQNQKFGFEVGPVCFLG

SEQ ID NO: 635 - protein, 95 aa, Homo sapiens
MTELETAMGMIIDVFSRYSGSEGSTQTLTKGELKVLMEKELPGFLQSGKDKDAVDKLLKDLDANGDAQVDFSEFIVFVAAITSACHKYFEKAGLK

SEQ ID NO: 636 - protein, 493 aa, Homo sapiens
MALFGALFLALLAGAHAEFPGCKIRVTSKALELVKQEGLRFLEQELETITIPDLRGKEGHFYYNISEVKVTELQLTSSELDFQPQQELMLQITNASLGLRFRRQLLYWFFYDGGYINASAEGVSIRTGLELSRDPAGRMKVSNVSCQASVSRMHAAFGGTFKKVYDFLSTFITSGMRFLLNQQICPVLYHAGTVLLNSLLDTVPVRSSVDELVGIDYSLMKDPVASTSNLDMDFRGAFFPLTERNWSLPNRAVEPQLQEEERMVYVAFSEFFFDSAMESYFRAGALQLLLVGDKVPHDLDMLLRATYFGSIVLLSPAVIDSPLKLELRVLAPPRCTIKPSGTTISVTASVTIALVPPDQPEVQLSSMTMDARLSAKMALRGKALRTQLDLRRFRIYSNHSALESLALIPLQAPLKTMLQIGVMPMLNERTWRGVQIPLPEGINFVHEVVTNHAGFLTIGADLHFAKGLREVIEKNRPADVRASTAPTPSTAAV

SEQ ID NO: 637 - protein, 356 aa, Homo sapiens; identical to SEQ ID NO: 588

SEQ ID NO: 638 - protein, 356 aa, Homo sapiens [sequence omitted]

SEQ ID NO: 639 - protein, 342 aa, Homo sapiens [sequence omitted]

SEQ ID NO: 640 - protein, 181 aa, Homo sapiens
MDPYKASYGVEDPEYAVTQLAQTTMRSELGKLSLDKVFRERESLNASIVDAINQAADCWGIRCLRYEIKDIHVPPRVKESMQMQVEAERRKRATVLESEGTRESAINVAEGKKQAQILASEAEKAEQINQAAGEASAVLAKAKAKAEAIRILAAALTQHVRGPWVGMGTGIDSGRGSLIYA

SEQ ID NO: 641 - protein, 286 aa, Homo sapiens
MRLLPRLLLLLLLVFPATVLFRGGPRGLLAVAQDLTEDEETVEDSIIEDEDDEAEVEEDEPTDLVEDKEEEDVSGEPEASPSADTTILFVKGEDFPANNIVKFLVGFTNKGTEDFIVESLDASFRYPQDYQFYIQNFTALPLNTVVPPQRQATFEYSFIPAEPMGGRPFGLVINLNYKDLNGNVFQDAVFNQTVTVIEREDGLDGETIFMYMFLAGLGLLVIVGLHQLLESRKRKRPIQKVEMGTSSQNDVDMSWIPQETLNQINKASPRRLPRKRAQKRSVGSDE

SEQ ID NO: 642 - DNA, 20 bp, Artificial
  Synthetic oligonucleotide
ctggcaagcagctggaagat

SEQ ID NO: 643 - DNA, 2519 bp, Homo sapiens
taccttggctatccccctctgagttcttgccttgattctcctgttactgtcccgcgaacccacatccctacaaagcaggaaagtatgcttgggagaggccaagtgagtggggaatcagcccaaagccaggcgtccagggtctccctcacctgaagctgactttttccccaccttggacagagggcgggagatgccatccccactgaacccagtgctttcaccagccatattagctcccactcaccccccgtcgtggaagcctcggccgtcacacctgcagggccggggcgtgcatggcctcagggatggcctgttcagctgctgggtgactcgggtccaggtgcctcaccacctgctgagctctgtgtgatttctggacacttctgctcgttgcctttgggctcagtgaagagtctggagtttatctggagtgaggtggccggttcttggtgggatctgagcagagtccattcaggagcaggaaagttcatctcagaccctaaatccagccacgtcatgccacgcttaacacctctaacaacttcccctggcacttaggacagcgtctggctccttccctcggctcatggccctcagaatctgcgtcacatacaccccagctctcccgataggtctctgcactcgctgttgcctctgcctggaacagtctccctcctggtgtcattgtctccgtggtgtgtccttcctgaccttccacctccaccaggtgccgacacttccctgaccccagtaacctcttctcttgggtgggtgaatgccacctgctgatgtctgatttattcatcggttttcttgtctgtagtctgtcccccttggggacagggactcgttgctcatgttcacccggcaggctggacacttcgtggagggctccaaagccggcagatcccggggccgcctctgtctctcccaggccctgcgtgttgcggtgagaggagcatttgtgtctctgtggtttgctgctggagctggtgaccgggagagaaacaagggagacaagggtgcccagacaggtgcggggctcagccaggaggcagaagacgtggacgtgtcccgggccaggagggtcacagatgcaccacaaggcactctgtgtggcactgggaacaggaattctgggagtcagtctgcaagggtggtgggcgttgctcacctgggagaagcctttagagtgggcgttgagcaggccattagctcgtgccctgaggaggtgcatgggcggcatgggctctccatggaaattatgtgggcgcgaatggatgtggctctgcgctcacctgggcgaggacttctggccggtgccggggcactctgcatgaccctggcagaatcgagctgccctgactatgaaaggggaagaagagcatgcctgaccctccaccggcaccccacccctcactgctccacctggggcctgcctctgcgggtggctgggtcctggctgactgttgtgactgttgaggccctgggggggtggcgcatgggagttaggaggactggccaggtggggcccactatgcacccacccccagtgtcaggtgcttctcctctcctcctccaccacctcctcctcctcctcctcatcatcatcctcacttgttgaggacgtcctgtgtgccaagtggtttatatgcccagcctcatttaatcctcagaatgactccatgaggtagctactaaaaccccccacttaacagatgaggaaactgaggcctagagaagctcaacaagttgcctaagttccaagtttcctctcccaactctcctaccctctcctcttccttctcctttctcccattcttccctgcctcttccctaactagacaattttttattgagtgtctcccaggtgcaggcatgagccaggtgctgggaaaatcatgataacccagctccttctggtcattttctcagctggttagaggctgggaggacacgcaagttcagctccagccgactggggcattggtggtagcccctggagacattgtgcaatggggctacgaggctgcatctggctccagggaagcgtgttgcaatccatgagtgatgtctgccatgcgtacaggcatggagagtgaggcgcctgtactgtctttctgtagaccctagactggtggggcctctgaaatgcatccagacactgtgctgggtgtgttgcatggccctcccaaccaattcagtatttttctccccattttccagggagaaatctaaggcgtcagaatgtaaggttcttattggaacccaggctccagggtccctggttttctgtgacatcatgctgcaggaccctgtttctctctttgctttggctgctggggagctcagaagggagctttaggcttgctctcagtcaccacattagctcaggggtttgggcatttttgtcgccgtctcctttgggctctgtctcctccctgctgtgcttcctgaggagcaggccggatgtaagttatcaactataaataaaaccaagacttccgttctggctctca

SEQ ID NO: 644 - DNA, 2423 bp, Homo sapiens
taccttggctatccccctctgagttcttgccttgattctcctgttactgtcccgcgaacccacatccctacaaagcaggaaagtatgcttgggagaggccaagtgagtggggaatcagcccaaagccaggcgtccagggtctccctcacctgaagctgactttttccccaccttggacagagggcgggagatgccatccccactgaacccagtgctttcaccagccatattagctcccactcaccccccgtcgtggaagcctcggccgtcacacctgcagggccggggcgtgcatggcctcagggatggcctgttcagctgctgggtgactcgggtccaggtgcctcaccacctgctgagctctgtgtgatttctggacacttctgctcgttgcctttgggctcagtgaagagtctggagtttatctggagtgaggtggccggttcttggtgggatctgagcagagtccattcaggagcaggaaagttcatctcagaccctaaatccagccacgtcatgccacgcttaacacctctaacaacttcccctggcacttaggacagcgtctggctccttccctcggctcatggccctcagaatctgcgtcacatacaccccagctctcccgataggtctctgcactcgctgttgcctctgcctggaacagtctccctcctggtgtcattgtctccgtggtgtgtccttcctgaccttccacctccaccagtctgtcccccttggggacagggactcgttgctcatgttcacccggcaggctggacacttcgtggagggctccaaagccggcagatcccggggccgcctctgtctctcccaggccctgcgtgttgcggtgagaggagcatttgtgtctctgtggtttgctgctggagctggtgaccgggagagaaacaagggagacaagggtgcccagacaggtgcggggctcagccaggaggcagaagacgtggacgtgtcccgggccaggagggtcacagatgcaccacaaggcactctgtgtggcactgggaacaggaattctgggagtcagtctgcaagggtggtgggcgttgctcacctgggagaagcctttagagtgggcgttgagcaggccattagctcgtgccctgaggaggtgcatgggcggcatgggctctccatggaaattatgtgggcgcgaatggatgtggctctgcgctcacctgggcgaggacttctggccggtgccggggcactctgcatgaccctggcagaatcgagctgccctgactatgaaaggggaagaagagcatgcctgaccctccaccggcaccccacccctcactgctccacctggggcctgcctctgcgggtggctgggtcctggctgactgttgtgactgttgaggccctgggggggtggcgcatgggagttaggaggactggccaggtggggcccactatgcacccacccccagtgtcaggtgcttctcctctcctcctccaccacctcctcctcctcctcctcatcatcatcctcacttgttgaggacgtcctgtgtgccaagtggtttatatgcccagcctcatttaatcctcagaatgactccatgaggtagctactaaaaccccccacttaacagatgaggaaactgaggcctagagaagctcaacaagttgcctaagttccaagtttcctctcccaactctcctaccctctcctcttccttctcctttctcccattcttccctgcctcttccctaactagacaattttttattgagtgtctcccaggtgcaggcatgagccaggtgctgggaaaatcatgataacccagctccttctggtcattttctcagctggttagaggctgggaggacacgcaagttcagctccagccgactggggcattggtggtagcccctggagacattgtgcaatggggctacgaggctgcatctggctccagggaagcgtgttgcaatccatgagtgatgtctgccatgcgtacaggcatggagagtgaggcgcctgtactgtctttctgtagaccctagactggtggggcctctgaaatgcatccagacactgtgctgggtgtgttgcatggccctcccaaccaattcagtatttttctccccattttccagggagaaatctaaggcgtcagaatgtaaggttcttattggaacccaggctccagggtccctggttttctgtgacatcatgctgcaggaccctgtttctctctttgctttggctgctggggagctcagaagggagctttaggcttgctctcagtcaccacattagctcaggggtttgggcatttttgtcgccgtctcctttgggctctgtctcctccctgctgtgcttcctgaggagcaggccggatgtaagttatcaactataaataaaaccaagacttccgttctggctctca

SEQ ID NO: 645 - DNA, 2329 bp, Homo sapiens
taccttggctatccccctctgagttcttgccttgattctcctgttactgtcccgcgaacccacatccctacaaagcaggaaagtatgcttgggagaggccaagtgagtggggaatcagcccaaagccaggcgtccagggtctccctcacctgaagctgactttttccccaccttggacagagggcgggagatgccatccccactgaacccagtgctttcaccagccatattagctcccactcaccccccgtcgtggaagcctcggccgtcacacctgcagggccggggcgtgcatggcctcagggatggcctgttcagctgctgggtgactcgggtccaggtgcctcaccacctgctgagctctgtgtgatttctggacacttctgctcgttgcctttgggctcagtgaagagtctggagtttatctggagtgaggtggccggttcttggtgggatctgagcaggacagcgtctggctccttccctcggctcatggccctcagaatctgcgtcacatacaccccagctctcccgataggtctctgcactcgctgttgcctctgcctggaacagtctccctcctggtgtcattgtctccgtggtgtgtccttcctgaccttccacctccaccagtctgtcccccttggggacagggactcgttgctcatgttcacccggcaggctggacacttcgtggagggctccaaagccggcagatcccggggccgcctctgtctctcccaggccctgcgtgttgcggtgagaggagcatttgtgtctctgtggtttgctgctggagctggtgaccgggagagaaacaagggagacaagggtgcccagacaggtgcggggctcagccaggaggcagaagacgtggacgtgtcccgggccaggagggtcacagatgcaccacaaggcactctgtgtggcactgggaacaggaattctgggagtcagtctgcaagggtggtgggcgttgctcacctgggagaagcctttagagtgggcgttgagcaggccattagctcgtgccctgaggaggtgcatgggcggcatgggctctccatggaaattatgtgggcgcgaatggatgtggctctgcgctcacctgggcgaggacttctggccggtgccggggcactctgcatgaccctggcagaatcgagctgccctgactatgaaaggggaagaagagcatgcctgaccctccaccggcaccccacccctcactgctccacctggggcctgcctctgcgggtggctgggtcctggctgactgttgtgactgttgaggccctgggggggtggcgcatgggagttaggaggactggccaggtggggcccactatgcacccacccccagtgtcaggtgcttctcctctcctcctccaccacctcctcctcctcctcctcatcatcatcctcacttgttgaggacgtcctgtgtgccaagtggtttatatgcccagcctcatttaatcctcagaatgactccatgaggtagctactaaaaccccccacttaacagatgaggaaactgaggcctagagaagctcaacaagttgcctaagttccaagtttcctctcccaactctcctaccctctcctcttccttctcctttctcccattcttccctgcctcttccctaactagacaattttttattgagtgtctcccaggtgcaggcatgagccaggtgctgggaaaatcatgataacccagctccttctggtcattttctcagctggttagaggctgggaggacacgcaagttcagctccagccgactggggcattggtggtagcccctggagacattgtgcaatggggctacgaggctgcatctggctccagggaagcgtgttgcaatccatgagtgatgtctgccatgcgtacaggcatggagagtgaggcgcctgtactgtctttctgtagaccctagactggtggggcctctgaaatgcatccagacactgtgctgggtgtgttgcatggccctcccaaccaattcagtatttttctccccattttccagggagaaatctaaggcgtcagaatgtaaggttcttattggaacccaggctccagggtccctggttttctgtgacatcatgctgcaggaccctgtttctctctttgctttggctgctggggagctcagaagggagctttaggcttgctctcagtcaccacattagctcaggggtttgggcatttttgtcgccgtctcctttgggctctgtctcctccctgctgtgcttcctgaggagcaggccggatgtaagttatcaactataaataaaaccaagacttccgttctggctctca

SEQ ID NO: 646 - DNA, 2351 bp, Homo sapiens
taccttggctatccccctctgagttcttgccttgattctcctgttactgtcccgcgaacccacatccctacaaagcaggaaagtatgcttgggagaggccaagtgagtggggaatcagcccaaagccaggcgtccagggtctccctcacctgaagctgactttttccccaccttggacagagggcgggagatgccatccccactgaacccagtgctttcaccagccatattagctcccactcaccccccgtcgtggaagcctcggccgtcacacctgcagggccggggcgtgcatggcctcagggatggcctgttcagctgctgggtgactcgggtccaggtgcctcaccacctgctgagctctgtgtgatttctggacacttctgctcgttgcctttgggctcagtgaagagtctggagtttatctggagtgaggtggccggttcttggtgggatctgagcaggtctctgcactcgctgttgcctctgcctggaacagtctccctcctggtgtcattgtctccgtggtgtgtccttcctgaccttccacctccaccaggtgccgacacttccctgaccccagtaacctcttctcttgggtgggtgaatgccacctgctgatgtctgatttattcatcggttttcttgtctgtagtctgtcccccttggggacagggactcgttgctcatgttcacccggcaggctggacacttcgtggagggctccaaagccggcagatcccggggccgcctctgtctctcccaggccctgcgtgttgcggtgagaggagcatttgtgtctctgtggtttgctgctggagctggtgaccgggagagaaacaagggagacaagggtgcccagacaggtgcggggctcagccaggaggcagaagacgtggacgtgtcccgggccaggagggtcacagatgcaccacaaggcactctgtgtggcactgggaacaggaattctgggagtcagtctgcaagggtggtgggcgttgctcacctgggagaagcctttagagtgggcgttgagcaggccattagctcgtgccctgaggaggtgcatgggcggcatgggctctccatggaaattatgtgggcgcgaatggatgtggctctgcgctcacctgggcgaggacttctggccggtgccggggcactctgcatgaccctggcagaatcgagctgccctgactatgaaaggggaagaagagcatgcctgaccctccaccggcaccccacccctcactgctccacctggggcctgcctctgcgggtggctgggtcctggctgactgttgtgactgttgaggccctgggggggtggcgcatgggagttaggaggactggccaggtggggcccactatgcacccacccccagtgtcaggtgcttctcctctcctcctccaccacctcctcctcctcctcctcatcatcatcctcacttgttgaggacgtcctgtgtgccaagtggtttatatgcccagcctcatttaatcctcagaatgactccatgaggtagctactaaaaccccccacttaacagatgaggaaactgaggcctagagaagctcaacaagttgcctaagttccaagtttcctctcccaactctcctaccctctcctcttccttctcctttctcccattcttccctgcctcttccctaactagacaattttttattgagtgtctcccaggtgcaggcatgagccaggtgctgggaaaatcatgataacccagctccttctggtcattttctcagctggttagaggctgggaggacacgcaagttcagctccagccgactggggcattggtggtagcccctggagacattgtgcaatggggctacgaggctgcatctggctccagggaagcgtgttgcaatccatgagtgatgtctgccatgcgtacaggcatggagagtgaggcgcctgtactgtctttctgtagaccctagactggtggggcctctgaaatgcatccagacactgtgctgggtgtgttgcatggccctcccaaccaattcagtatttttctccccattttccagggagaaatctaaggcgtcagaatgtaaggttcttattggaacccaggctccagggtccctggttttctgtgacatcatgctgcaggaccctgtttctctctttgctttggctgctggggagctcagaagggagctttaggcttgctctcagtcaccacattagctcaggggtttgggcatttttgtcgccgtctcctttgggctctgtctcctccctgctgtgcttcctgaggagcaggccggatgtaagttatcaactataaataaaaccaagacttccgttctggctctca

SEQ ID NO: 647 - DNA, 3175 bp, Homo sapiens
taccttggctatccccctctgagttcttgccttgattctcctgttactgtcccgcgaacccacatccctacaaagcaggaaagtatgcttgggagaggccaagtgagtggggaatcagcccaaagccaggcgtccagggtctccctcacctgaagctgactttttccccaccttggacagagggcgggagatgccatccccactgaacccagtgctttcaccagccatattagctcccactcaccccccgtcgtggaagcctcggccgtcacacctgcagggccggggcgtgcatggcctcagggatggcctgttcagctgctgggtgactcgggtccaggtgcctcaccacctgctgagctctgtgtgatttctggacacttctgctcgttgcctttgggctcagtgaagagtctggagtttatctggagtgaggtggccggttcttggtgggatctgagcaggtaagaagcagggtctttcttatgttttaaggaaagccctgtggctgctgggtgggggaccagctggaggggcaggagggcagcaggtgactcattacaaggctggggccatcatcctgtgagagctgggcatgaccagtgcaggtcagtggggttgagggtacagaccagtgggacccacagacggctcgggagtgaccaagcctctgctgagctgcccaggtcccctctggtggacacctcctacccggagccccccaaggtggtgccaaagctagaccaccatacagccagaggcctccaggccctacccacgacagcccagctggcttctgcccagccaccgtcacacacagagggcagccgtccccatggtccctagaggcggttgaggaccactgtgcctggagtcatctgtggctataaaccaggaggagaaggctgcccaccccctgccccagagatggggaggctggggccacccggtggatttgggcaggtcccagcttccaggatcatgaggtgaaaacgtgaagggaccctagaggccatggggacccaggcacagagcggcggcctctcatcctccccatggtcaaggaggtcagtgccttcccggggtggattacggatggtagtatcttccttctcctcagagtccattcaggagcaggaaagttcatctcagaccctaaatccagccacgtcatgccacgcttaacacctctaacaacttcccctggcacttaggacagcgtctggctccttccctcggctcatggccctcagaatctgcgtcacatacaccccagctctcccgataggtctctgcactcgctgttgcctctgcctggaacagtctccctcctggtgtcattgtctccgtggtgtgtccttcctgaccttccacctccaccaggtgccgacacttccctgaccccagtaacctcttctcttgggtgggtgaatgccacctgctgatgtctgatttattcatcggttttcttgtctgtagtctgtcccccttggggacagggactcgttgctcatgttcacccggcaggctggacacttcgtggagggctccaaagccggcagatcccggggccgcctctgtctctcccaggccctgcgtgttgcggtgagaggagcatttgtgtctctgtggtttgctgctggagctggtgaccgggagagaaacaagggagacaagggtgcccagacaggtgcggggctcagccaggaggcagaagacgtggacgtgtcccgggccaggagggtcacagatgcaccacaaggcactctgtgtggcactgggaacaggaattctgggagtcagtctgcaagggtggtgggcgttgctcacctgggagaagcctttagagtgggcgttgagcaggccattagctcgtgccctgaggaggtgcatgggcggcatgggctctccatggaaattatgtgggcgcgaatggatgtggctctgcgctcacctgggcgaggacttctggccggtgccggggcactctgcatgaccctggcagaatcgagctgccctgactatgaaaggggaagaagagcatgcctgaccctccaccggcaccccacccctcactgctccacctggggcctgcctctgcgggtggctgggtcctggctgactgttgtgactgttgaggccctgggggggtggcgcatgggagttaggaggactggccaggtggggcccactatgcacccacccccagtgtcaggtgcttctcctctcctcctccaccacctcctcctcctcctcctcatcatcatcctcacttgttgaggacgtcctgtgtgccaagtggtttatatgcccagcctcatttaatcctcagaatgactccatgaggtagctactaaaaccccccacttaacagatgaggaaactgaggcctagagaagctcaacaagttgcctaagttccaagtttcctctcccaactctcctaccctctcctcttccttctcctttctcccattcttccctgcctcttccctaactagacaattttttattgagtgtctcccaggtgcaggcatgagccaggtgctgggaaaatcatgataacccagctccttctggtcattttctcagctggttagaggctgggaggacacgcaagttcagctccagccgactggggcattggtggtagcccctggagacattgtgcaatggggctacgaggctgcatctggctccagggaagcgtgttgcaatccatgagtgatgtctgccatgcgtacaggcatggagagtgaggcgcctgtactgtctttctgtagaccctagactggtggggcctctgaaatgcatccagacactgtgctgggtgtgttgcatggccctcccaaccaattcagtatttttctccccattttccagggagaaatctaaggcgtcagaatgtaaggttcttattggaacccaggctccagggtccctggttttctgtgacatcatgctgcaggaccctgtttctctctttgctttggctgctggggagctcagaagggagctttaggcttgctctcagtcaccacattagctcaggggtttgggcatttttgtcgccgtctcctttgggctctgtctcctccctgctgtgcttcctgaggagcaggccggatgtaagttatcaactataaataaaaccaagacttccgttctggctctca

SEQ ID NO: 648 - DNA, 2425 bp, Homo sapiens
taccttggctatccccctctgagttcttgccttgattctcctgttactgtcccgcgaacccacatccctacaaagcaggaaagtatgcttgggagaggccaagtgagtggggaatcagcccaaagccaggcgtccagggtctccctcacctgaagctgactttttccccaccttggacagagggcgggagatgccatccccactgaacccagtgctttcaccagccatattagctcccactcaccccccgtcgtggaagcctcggccgtcacacctgcagggccggggcgtgcatggcctcagggatggcctgttcagctgctgggtgactcgggtccaggtgcctcaccacctgctgagctctgtgtgatttctggacacttctgctcgttgcctttgggctcagtgaagagtctggagtttatctggagtgaggtggccggttcttggtgggatctgagcaggacagcgtctggctccttccctcggctcatggccctcagaatctgcgtcacatacaccccagctctcccgataggtctctgcactcgctgttgcctctgcctggaacagtctccctcctggtgtcattgtctccgtggtgtgtccttcctgaccttccacctccaccaggtgccgacacttccctgaccccagtaacctcttctcttgggtgggtgaatgccacctgctgatgtctgatttattcatcggttttcttgtctgtagtctgtcccccttggggacagggactcgttgctcatgttcacccggcaggctggacacttcgtggagggctccaaagccggcagatcccggggccgcctctgtctctcccaggccctgcgtgttgcggtgagaggagcatttgtgtctctgtggtttgctgctggagctggtgaccgggagagaaacaagggagacaagggtgcccagacaggtgcggggctcagccaggaggcagaagacgtggacgtgtcccgggccaggagggtcacagatgcaccacaaggcactctgtgtggcactgggaacaggaattctgggagtcagtctgcaagggtggtgggcgttgctcacctgggagaagcctttagagtgggcgttgagcaggccattagctcgtgccctgaggaggtgcatgggcggcatgggctctccatggaaattatgtgggcgcgaatggatgtggctctgcgctcacctgggcgaggacttctggccggtgccggggcactctgcatgaccctggcagaatcgagctgccctgactatgaaaggggaagaagagcatgcctgaccctccaccggcaccccacccctcactgctccacctggggcctgcctctgcgggtggctgggtcctggctgactgttgtgactgttgaggccctgggggggtggcgcatgggagttaggaggactggccaggtggggcccactatgcacccacccccagtgtcaggtgcttctcctctcctcctccaccacctcctcctcctcctcctcatcatcatcctcacttgttgaggacgtcctgtgtgccaagtggtttatatgcccagcctcatttaatcctcagaatgactccatgaggtagctactaaaaccccccacttaacagatgaggaaactgaggcctagagaagctcaacaagttgcctaagttccaagtttcctctcccaactctcctaccctctcctcttccttctcctttctcccattcttccctgcctcttccctaactagacaattttttattgagtgtctcccaggtgcaggcatgagccaggtgctgggaaaatcatgataacccagctccttctggtcattttctcagctggttagaggctgggaggacacgcaagttcagctccagccgactggggcattggtggtagcccctggagacattgtgcaatggggctacgaggctgcatctggctccagggaagcgtgttgcaatccatgagtgatgtctgccatgcgtacaggcatggagagtgaggcgcctgtactgtctttctgtagaccctagactggtggggcctctgaaatgcatccagacactgtgctgggtgtgttgcatggccctcccaaccaattcagtatttttctccccattttccagggagaaatctaaggcgtcagaatgtaaggttcttattggaacccaggctccagggtccctggttttctgtgacatcatgctgcaggaccctgtttctctctttgctttggctgctggggagctcagaagggagctttaggcttgctctcagtcaccacattagctcaggggtttgggcatttttgtcgccgtctcctttgggctctgtctcctccctgctgtgcttcctgaggagcaggccggatgtaagttatcaactataaataaaaccaagacttccgttctggctctca

SEQ ID NO: 649 - DNA, 2589 bp, Homo sapiens
taccttggctatccccctctgagttcttgccttgattctcctgttactgtcccgcgaacccacatccctacaaagcaggaaagtatgcttgggagaggccaagtgagtggggaatcagcccaaagccaggcgtccagggtctccctcacctgaagctgactttttccccaccttggacagagggcgggagatgccatccccactgaacccagtgctttcaccagccatattagctcccactcaccccccgtcgtggaagcctcggccgtcacacctgcagggccggggcgtgcatggcctcagggatggcctgttcagctgctgggtgactcgggtccaggtgcctcaccacctgctgagctctgtgtgatttctggacacttctgctcgttgcctttgggctcagtgaagagtctggagtttatctggagtgaggtggccggttcttggtgggatctgagcagagtccattcaggagcaggaaagttcatctcagaccctaaatccagccacgtcatgccacgcttaacacctctaacaacttcccctggcacttaggacagcgtctggctccttccctcggctcatggccctcagaatctgcgtcacatacaccccagctctcccgataggtctctgcactcgctgttgcctctgcctggaacagtctccctcctggtgtcattgtctccgtggtgtgtccttcctgaccttccacctccaccagtctgtcccccttggggacagggactcgttgctcatgttcacccggcaggctggacacttcgtggagggctccaaagccggcagatcccggggccgcctctgtctctcccaggccctgcgtgttgcggtgagaggagcatttgtgtctctgtggtttgctgctggagctggtgaccgggagagaaacaagggagacaagggtgcccagacaggtgcggggctcagccaggaggcagaagacgtggacgtgtcccgggccaggagggtcacagatgcaccacaaggcactctgtgtggcactgggaacaggaattctgggagtcagtctgcaagggtggtgggcgttgctcacctgggagaagcctttagagtgggcgttgagcaggccattagctcgtgccctgaggaggtgcatgggcggcatgggctctccatggaaattatgtgggcgcgaatggatgtggctctgcgctcacctgggcgaggacttctggccggtgccggggcactctgcatgaccctggcagaatcgagctgccctgactatgaaaggggaagaagagcatgcctgaccctccaccggcaccccacccctcactgctccacctggggcctgcctctgcgggtggctgggtcctggctgactgttgtgactgttgaggccctgggggggtggcgcatgggagttaggaggactggccaggtggggcccactatgcacccacccccagtgtcaggtgcttctcctctcctcctccaccacctcctcctcctcctcctcatcatcatcctcacttgttgaggacgtcctgtgtgccaagtggtttatatgcccagcctcatttaatcctcagaatgactccatgaggtagctactaaaaccccccacttaacagatgaggaaactgaggcctagagaagctcaacaagttgcctaagttccaagtttcctctcccaactctcctaccctctcctcttccttctcctttctcccattcttccctgcctcttccctaactagacaattttttattgagtgtctcccaggtgcaggcatgagccaggtgctgggaaaatcatgataacccagctccttctggtcattttctcagctggttagaggctgggaggacacgcaagttcagctccagccgactggggcattggtggtagcccctggagacattgtgcaatggggctacgaggctgcatctggctccagggaagcgtgttgcaatccatgagtgatgtctgccatgcgtacaggcatggagagtgaggcgcctgtactgtctttctgtagaccctagactggtggggcctctgaaatgcatccagacactgtgctgggtgtgttgcatggccctcccaaccaattcagtatttttctccccattttccagggagaaatctaaggcgtcagaatgtaaggttcttattggaacccaggctccagggtccctggttttctgtgacatcatgctgcaggaccctgtttctctctttgctttggctgctggggagctcagaagggagctttaggcttgctctcagtcaccacattagctcaggggtttgggcatttttgtcgccgtctcctttgggctctgtctcctccctgctgtgcttcctgaggagcaggccggatgtaagttatcaactataaataaaaccaagacttccgttctggctctcactctagtttcctggtgcattttttttttttaaagttcttaatcaagggaggggatactcctaactgaagatgacatcagcatcagctggccccggggggcaggcccccagcccccaggcccgtgtgggccctgaatgcccccattatgaggggtaacctcattaca

SEQ ID NO: 650 - DNA, 2259 bp, Homo sapiens
taccttggctatccccctctgagttcttgccttgattctcctgttactgtcccgcgaacccacatccctacaaagcaggaaagtatgcttgggagaggccaagtgagtggggaatcagcccaaagccaggcgtccagggtctccctcacctgaagctgactttttccccaccttggacagagggcgggagatgccatccccactgaacccagtgctttcaccagccatattagctcccactcaccccccgtcgtggaagcctcggccgtcacacctgcagggccggggcgtgcatggcctcagggatggcctgttcagctgctgggtgactcgggtccaggtgcctcaccacctgctgagctctgtgtgatttctggacacttctgctcgttgcctttgggctcagtgaagagtctggagtttatctggagtgaggtggccggttcttggtgggatctgagcagagtccattcaggagcaggaaagttcatctcagaccctaaatccagccacgtcatgccacgcttaacacctctaacaacttcccctggcacttaggacagcgtctggctccttccctcggctcatggccctcagaatctgcgtcacatacaccccagctctcccgataggtctctgcactcgctgttgcctctgcctggaacagtctccctcctggtgtcattgtctccgtggtgtgtccttcctgaccttccacctccaccaggtgccgacacttccctgaccccagtaacctcttctcttgggtgggtgaatgccacctgctgatgtctgatttattcatcggttttcttgtctgtagtctgtcccccttggggacagggactcgttgctcatgttcacccggcaggaattctgggagtcagtctgcaagggtggtgggcgttgctcacctgggagaagcctttagagtgggcgttgagcaggccattagctcgtgccctgaggaggtgcatgggcggcatgggctctccatggaaattatgtgggcgcgaatggatgtggctctgcgctcacctgggcgaggacttctggccggtgccggggcactctgcatgaccctggcagaatcgagctgccctgactatgaaaggggaagaagagcatgcctgaccctccaccggcaccccacccctcactgctccacctggggcctgcctctgcgggtggctgggtcctggctgactgttgtgactgttgaggccctgggggggtggcgcatgggagttaggaggactggccaggtggggcccactatgcacccacccccagtgtcaggtgcttctcctctcctcctccaccacctcctcctcctcctcctcatcatcatcctcacttgttgaggacgtcctgtgtgccaagtggtttatatgcccagcctcatttaatcctcagaatgactccatgaggtagctactaaaaccccccacttaacagatgaggaaactgaggcctagagaagctcaacaagttgcctaagttccaagtttcctctcccaactctcctaccctctcctcttccttctcctttctcccattcttccctgcctcttccctaactagacaattttttattgagtgtctcccaggtgcaggcatgagccaggtgctgggaaaatcatgataacccagctccttctggtcattttctcagctggttagaggctgggaggacacgcaagttcagctccagccgactggggcattggtggtagcccctggagacattgtgcaatggggctacgaggctgcatctggctccagggaagcgtgttgcaatccatgagtgatgtctgccatgcgtacaggcatggagagtgaggcgcctgtactgtctttctgtagaccctagactggtggggcctctgaaatgcatccagacactgtgctgggtgtgttgcatggccctcccaaccaattcagtatttttctccccattttccagggagaaatctaaggcgtcagaatgtaaggttcttattggaacccaggctccagggtccctggttttctgtgacatcatgctgcaggaccctgtttctctctttgctttggctgctggggagctcagaagggagctttaggcttgctctcagtcaccacattagctcaggggtttgggcatttttgtcgccgtctcctttgggctctgtctcctccctgctgtgcttcctgaggagcaggccggatgtaagttatcaactataaataaaaccaagacttccgttctggctctca

SEQ ID NO: 651 - DNA, 2112 bp, Homo sapiens
taccttggctatccccctctgagttcttgccttgattctcctgttactgtcccgcgaacccacatccctacaaagcaggaaagtatgcttgggagaggccaagtgagtggggaatcagcccaaagccaggcgtccagggtctccctcacctgaagctgactttttccccaccttggacagagggcgggagatgccatccccactgaacccagtgctttcaccagccatattagctcccactcaccccccgtcgtggaagcctcggccgtcacacctgcagggccggggcgtgcatggcctcagggatggcctgttcagctgctgggtgactcgggtccaggtgcctcaccacctgctgagctctgtgtgatttctggacacttctgctcgttgcctttgggctcagtgaagagtctggagtttatctggagtgaggtggccggttcttggtgggatctgagcaggctggacacttcgtggagggctccaaagccggcagatcccggggccgcctctgtctctcccaggccctgcgtgttgcggtgagaggagcatttgtgtctctgtggtttgctgctggagctggtgaccgggagagaaacaagggagacaagggtgcccagacaggtgcggggctcagccaggaggcagaagacgtggacgtgtcccgggccaggagggtcacagatgcaccacaaggcactctgtgtggcactgggaacaggaattctgggagtcagtctgcaagggtggtgggcgttgctcacctgggagaagcctttagagtgggcgttgagcaggccattagctcgtgccctgaggaggtgcatgggcggcatgggctctccatggaaattatgtgggcgcgaatggatgtggctctgcgctcacctgggcgaggacttctggccggtgccggggcactctgcatgaccctggcagaatcgagctgccctgactatgaaaggggaagaagagcatgcctgaccctccaccggcaccccacccctcactgctccacctggggcctgcctctgcgggtggctgggtcctggctgactgttgtgactgttgaggccctgggggggtggcgcatgggagttaggaggactggccaggtggggcccactatgcacccacccccagtgtcaggtgcttctcctctcctcctccaccacctcctcctcctcctcctcatcatcatcctcacttgttgaggacgtcctgtgtgccaagtggtttatatgcccagcctcatttaatcctcagaatgactccatgaggtagctactaaaaccccccacttaacagatgaggaaactgaggcctagagaagctcaacaagttgcctaagttccaagtttcctctcccaactctcctaccctctcctcttccttctcctttctcccattcttccctgcctcttccctaactagacaattttttattgagtgtctcccaggtgcaggcatgagccaggtgctgggaaaatcatgataacccagctccttctggtcattttctcagctggttagaggctgggaggacacgcaagttcagctccagccgactggggcattggtggtagcccctggagacattgtgcaatggggctacgaggctgcatctggctccagggaagcgtgttgcaatccatgagtgatgtctgccatgcgtacaggcatggagagtgaggcgcctgtactgtctttctgtagaccctagactggtggggcctctgaaatgcatccagacactgtgctgggtgtgttgcatggccctcccaaccaattcagtatttttctccccattttccagggagaaatctaaggcgtcagaatgtaaggttcttattggaacccaggctccagggtccctggttttctgtgacatcatgctgcaggaccctgtttctctctttgctttggctgctggggagctcagaagggagctttaggcttgctctcagtcaccacattagctcaggggtttgggcatttttgtcgccgtctcctttgggctctgtctcctccctgctgtgcttcctgaggagcaggccggatgtaagttatcaactataaataaaaccaagacttccgttctggctctca

SEQ ID NO: 652 - DNA, 2401 bp, Homo sapiens
taccttggctatccccctctgagttcttgccttgattctcctgttactgtcccgcgaacccacatccctacaaagcaggaaagtatgcttgggagaggccaagtgagtggggaatcagcccaaagccaggcgtccagggtctccctcacctgaagctgactttttccccaccttggacagagggcgggagatgccatccccactgaacccagtgctttcaccagccatattagctcccactcaccccccgtcgtggaagcctcggccgtcacacctgcagggccggggcgtgcatggcctcagggatggcctgttcagctgctgggtgactcgggtccaggtgcctcaccacctgctgagctctgtgtgatttctggacacttctgctcgttgcctttgggctcagtgaagagtctggagtttatctggagtgaggtggccggttcttggtgggatctgagcagagtccattcaggagcaggaaagttcatctcagaccctaaatccagccacgtcatgccacgcttaacacctctaacaacttcccctggcacttaggacagcgtctggctccttccctcggctcatggccctcagaatctgcgtcacatacaccccagctctcccgataggtctctgcactcgctgttgcctctgcctggaacagtctccctcctggtgtcattgtctccgtggtgtgtccttcctgaccttccacctccaccagtctgtcccccttggggacagggactcgttgctcatgttcacccggcaggctggacacttcgtggagggctccaaagccggcagatcccggggccgcctctgtctctcccaggccctgcgtgttgcggtgagaggagcatttgtgtctctgtggtttgctgctggagctggtgaccgggagagaaacaagggagacaagggtgcccagacaggtgcggggctcagccaggaggcagaagacgtggacgtgtcccgggccaggagggtcacagatgcaccacaaggcactctgtgtggcactgggaacaggaattctgggagtcagtctgcaagggtggtgggcgttgctcacctgggagaagcctttagagtgggcgttgagcaggccattagctcgtgccctgaggaggtgcatgggcggcatgggctctccatggaaattatgtgggcgcgaatggatgtggctctgcgctcacctgggcgaggacttctggccggtgccggggcactctgcatgaccctggcagaatcgagctgccctgactatgaaaggggaagaagagcatgcctgaccctccaccggcaccccacccctcactgctccacctggggcctgcctctgcgggtggctgggtcctggctgactgttgtgactgttgaggccctgggggggtggcgcatgggagttaggaggactggccaggtggggcccactatgcacccacccccagtgtcaggtgcttctcctctcctcctccaccacctcctcctcctcctcctcatcatcatcctcacttgttgaggacgtcctgtgtgccaagtggtttatatgcccagcctcatttaatcctcagaatgactccatgaggtagctactaaaaccccccacttaacagatgaggaaactgaggcctagagaagctcaacaagttgcctaagttccaagtttcctctcccaactctcctaccctctcctcttccttctcctttctcccattcttccctgcctcttccctaactagacaattttttattgagtgtctcccaggtgcaggcatgagccaggtgctgggaaaatcatgataacccagctccttctggtcattttctcagctggttagaggctgggaggacacgcaagttcagctccagccgactggggcattggtggtagcccctggagacattgtgcaatggggctacgaggctgcatctggctccagggaagcgtgttgcaatccatgagtgatgtctgccatgcgtacaggcatggagagtgaggcgcctgtactgtctttctgtagaccctagactggtggggcctctgaaatgcatccagacactgtgctgggtgtgttgcatggccctcccaaccaattcagtatttttctccccattttccagggagaaatctaaggcgtcagaatgtaaggttcttattggaacccaggctccagggtccctggttttctgtgacatcatgctgcaggaccctgtttctctctttgctttggctgctggggagctcagaagggagctttaggcttgctctcagtcaccacattagtcgccgtctcctttgggctctgtctcctccctgctgtgcttcctgaggagcaggccggatgtaagttatcaactataaataaaaccaagacttccgttctggctctca

SEQ ID NO: 653 - DNA, 633 bp, Homo sapiens
taccttggctatccccctctgagttcttgccttgattctcctgttactgtcccgcgaacccacatccctacaaagcaggaaagtatgcttgggagaggccaagtgagtggggaatcagcccaaagccaggcgtccagggtctccctcacctgaagctgactttttccccaccttggacagagggcgggagatgccatccccactgaacccagtgctttcaccagccatattagctcccactcaccccccgtcgtggaagcctcggccgtcacacctgcagggccggggcgtgcatggcctcagggatggcctgttcagctgctgggtgactcgggtccaggtgcctcaccacctgctgagctctgtgtgatttctggacacttctgctcgttgcctttgggctcagtgaagagtctggagtttatctggagtgaggtggccggttcttggtgggatctgagcaggtggaggcaatgcccagagctgtggcagccaccttgcagccgtgaagcaccagtgggaatgacagtcaagagaaccacggagatgccagcccctggacccacagcagcagcacctgcttccagactcagagtgtgagaaaaaaataaactcctatttgtttatggcaag

SEQ ID NO: 654 - DNA, 1491 bp, Homo sapiens
taccttggctatccccctctgagttcttgccttgattctcctgttactgtcccgcgaacccacatccctacaaagcaggaaagtatgcttgggagaggccaagtgagtggggaatcagcccaaagccaggcgtccagggtctccctcacctgaagctgactttttccccaccttggacagagggcgggagatgccatccccactgaacccagtgctttcaccagccatattagctcccactcaccccccgtcgtggaagcctcggccgtcacacctgcagggccggggcgtgcatggcctcagggatggcctgttcagctgctgggtgactcgggtccaggtgcctcaccacctgctgagctctgtgtgatttctggacacttctgctcgttgcctttgggctcagtgaagagtctggagtttatctggagtgaggtggccggttcttggtgggatctgagcaggtggaggcaatgcccagagctgtggcagccaccttgcagccgtgaagcaccagtgggaatgacagtcaagagaaccacggagatgccagcccctggacccacagcagcagcacctgcttccagactcagagtgtgagaaaaaaataaactcctatttgtttatggcaagagacaaggtctagctctgtgatgcaggccggaggacagtggtgtgatcacagctcactgcagccttgaactcctgggttccagcaatcctcccacctcagcctccttagtaggcgtggctacagtaatggaagacagcaaaagaagtttggagattcctggtttaaagcatttaaagcctctgtgaaaatttgcccaggccaacaacttcactttccacactcagtgccacgaagtgcagctctaagctggggatttctgtgcagagatgatccactgagtgcaacccaccaccgtgcggacaccacccctgcagaatcatctgtgaaaacaaccccaggcccagacataggggccagctaagcttcgtagccctcgaaatacagggagtgccccctctggaccctcgagcccacagtccatccaccacagaggtgtctgctgctcatcagatagttcctaccaagaaaatgctgtgtgaacccatctgtgtggcaaaccggcacggggagaaagctgacttccaaggacgtctaccaactgtcacttgcaaaccagaacttgcctctttgtagatgaagactggcagggctgaagaaatgatctcatgttgaaattaatgatgagcttcagggtgaggtgactcagttcgaatgctgttgaatgttggtgtcatgggacttttacaagaagtaaaactgggctataaaaatgatccccttcccctcactagagaagggaggttctattcctctctctgtctttccctctctctatatataccaaaggtcaaatctttggtattttgcattgagtctttaattattcattcactttgacctagtaattgcacttcaga

SEQ ID NO: 655 - DNA, 2206 bp, Homo sapiens
ccccatgttaacggcccccagtgtggactgtcagctccatgaaggcagggccctacttatctcgttcacagcacaaggccgggcacacagtaggtgctcactcaacattcctgggatcaatgggaaatgactgtcggggaaccctctgcagccgtccttgtcgagggccccagatggggtgtgggtggcccctccccatccagatggtgttggaggggctgggggccaggcatggcgagcaggccgaggctgcaggtggacatccctgggactggagctgctgggggccaggctgcagttccagcccaggtcaggtctcatgtgaggcctccgtgaaacaagaatttctctctccgtttccttctcctgtctgactcacactttcgttttgaagttccccctttctgccagtgctttgcctgaggttacggagtggtcaagcgaggccagcagggcgtggagaccaggaggaagctgggctgcagtttcattcacaaaaacacgacccgcccgcttcctgtgtcctgcctgggctgcccggcccgcagccctacagccagttcacagggtgtttgcaagtttgcaggggccagtgagggtgctcctggggtttaagaggcttgagtttgtccaccccacggcctctgtcaggacccccccttcccgccactatgcttctgtctcccacggtgcctcccagctcacccccacaggggcctggcgcagagcctcaaactcaggattctataggagctgagggttgggtctgagcaccttggcgcttcccctggccccactgacccatccttgtttcagcacagagctgggaggcccagggaggatggcctctgctgactggtccagctccctctgtggttcccacctctcagtgtggggtggatccaagggggagggaagagaaggggatgggaagaaaacgatgcctgttggggcacaggctcctaaacccaacctcgtatcgcctcctgcgagtagcttccaggtgtccacagggagcccggggtcatgctggcatcattcattctccacgcatcagatgatcctgtggcccctcagtgccaggccccactggccctctgcgcacatcagtgactctgatgttctcccccaccgcatgctgccaatctgatggtggagacagaacagcagtcccggatggtggaggcaatgcccagagctgtggcagccaccttgcagccgtgaagcaccagtgggaatgacagtcaagagaaccacggagatgccagcccctggacccacagcagcagcacctgcttccagactcagagtgtgagaaaaaaataaactcctatttgtttatggcaagagacaaggtctagctctgtgatgcaggccggaggacagtggtgtgatcacagctcactgcagccttgaactcctgggttccagcaatcctcccacctcagcctccttagtaggcgtggctacagtaatggaagacagcaaaagaagtttggagattcctggtttaaagcatttaaagcctctgtgaaaatttgcccaggccaacaacttcactttccacactcagtgccacgaagtgcagctctaagctggggatttctgtgcagagatgatccactgagtgcaacccaccaccgtgcggacaccacccctgcagaatcatctgtgaaaacaaccccaggcccagacataggggccagctaagcttcgtagccctcgaaatacagggagtgccccctctggaccctcgagcccacagtccatccaccacagaggtgtctgctgctcatcagatagttcctaccaagaaaatgctgtgtgaacccatctgtgtggcaaaccggcacggggagaaagctgacttccaaggacgtctaccaactgtcacttgcaaaccagaacttgcctctttgtagatgaagactggcagggctgaagaaatgatctcatgttgaaattaatgatgagcttcagggtgaggtgactcagttcgaatgctgttgaatgttggtgtcatgggacttttacaagaagtaaaactgggctataaaaatgatccccttcccctcactagagaagggaggttctattcctctctctgtctttccctctctctatatataccaaaggtcaaatctttggtattttgcattgagtctttaattattcattcactttgacctagtaattgcacttcaga

SEQ ID NO: 656 - DNA, 1104 bp, Homo sapiens
tgactgcatgaggctgtacgtatctgcagcctgccccttttcatggtgtttatccactcacacagtgatgagcagtggtggaggcaatgcccagagctgtggcagccaccttgcagccgtgaagcaccagtgggaatgacagtcaagagaaccacggagatgccagcccctggacccacagcagcagcacctgcttccagactcagagtgtgagaaaaaaataaactcctatttgtttatggcaagagacaaggtctagctctgtgatgcaggccggaggacagtggtgtgatcacagctcactgcagccttgaactcctgggttccagcaatcctcccacctcagcctccttagtaggcgtggctacagtaatggaagacagcaaaagaagtttggagattcctggtttaaagcatttaaagcctctgtgaaaatttgcccaggccaacaacttcactttccacactcagtgccacgaagtgcagctctaagctggggatttctgtgcagagatgatccactgagtgcaacccaccaccgtgcggacaccacccctgcagaatcatctgtgaaaacaaccccaggcccagacataggggccagctaagcttcgtagccctcgaaatacagggagtgccccctctggaccctcgagcccacagtccatccaccacagaggtgtctgctgctcatcagatagttcctaccaagaaaatgctgtgtgaacccatctgtgtggcaaaccggcacggggagaaagctgacttccaaggacgtctaccaactgtcacttgcaaaccagaacttgcctctttgtagatgaagactggcagggctgaagaaatgatctcatgttgaaattaatgatgagcttcagggtgaggtgactcagttcgaatgctgttgaatgttggtgtcatgggacttttacaagaagtaaaactgggctataaaaatgatccccttcccctcactagagaagggaggttctattcctctctctgtctttccctctctctatatataccaaaggtcaaatctttggtattttgcattgagtctttaattattcattcactttgacctagtaattgcacttcaga

SEQ ID NO: 657 - DNA, 1614 bp, Homo sapiens
ccccatgttaacggcccccagtgtggactgtcagctccatgaaggcagggccctacttatctcgttcacagcacaaggccgggcacacagtaggtgctcactcaacattcctgggatcaatgggaaatgactgtcggggaaccctctgcagccgtccttgtcgagggccccagatggggtgtgggtggcccctccccatccagatggtgttggaggggctgggggccaggcatggcgagcaggccgaggctgcaggtggacatccctgggactggagctgctgggggccaggctgcagttccagcccaggtcaggtctcatgtgaggcctccgtgaaacaagaatttctctctccgtttccttctcctgtctgactcacactttcgttttgaagttccccctttctgccagtgctttgcctgaggttacggagtggtcaagcgaggccagcagggcgtggagaccaggaggaagctgggctgcagtttcattcacaaaaacacgacccgcccgcttcctgtgtcctgcctgggctgcccggcccgcagccctacagccagttcacagggtgtttgcaagtttgcaggggccagtgagggtgctcctggggtttaagaggcttgagtttgtccaccccacggcctctgtcaggacccccccttcccgccactatgcttctgtctcccacggtgcctcccagctcacccccacaggggcctggcgcagagcctcaaactcaggattctataggagctgagggttgggtctgagcaccttggcgcttcccctggccccactgacccatccttgtttcagcacagagctgggaggcccagggaggatggcctctgctgactggtccagctccctctgtggttcccacctctcagtgtggggtggatccaagggggagggaagagaaggggatgggaagaaaacgatgcctgttggggcacaggctcctaaacccaacctcgtatcgcctcctgcgagtagcttccaggtgtccacagggagcccggggtcatgctggcatcattcattctccacgcatcagatgatcctgtggcccctcagtgccaggccccactggccctctgcgcacatcagtgactctgatgttctcccccaccgcatgctgccaatctgatggtggagacagaacagcagtcccggatggtggaggcaatgcccagagctgtggcagccaccttgcagccgtgaagcaccagtgggaatgacagtcaagagaaccacggagatgccagcccctggacccacagcagcagcacctgcttccagactcagagtgtgagaaaaaaataaactcctatttgtttatggcaagagacaaggtctagctctgtgatgcaggccggaggacagtggtgtgatcacagctcactgcagccttgaactcctgggttccagcaatcctcccacctcagcctccttagtaggcgtggctacaggtgtgtaccaccatgtccagccctaaatttcattctttttaatttcaatattgttatgtgttttctaatgttttataacttattggtatggtagatgtacatgtatacaaattaaaagaaaatttatatatattttactggg

SEQ ID NO: 658 - DNA, 602 bp, Homo sapiens
taccttggctatccccctctgagttcttgccttgattctcctgttactgtcccgcgaacccacatccctacaaagcaggaaagtatgcttgggagaggccaagtgagtggggaatcagcccaaagccaggcgtccagggtctccctcacctgaagctgactttttccccaccttggacagagggcgggagatgccatccccactgaacccagtgctttcaccagccatattagctcccactcaccccccgtcgtggaagcctcggccgtcacacctgcagggccggggcgtgcatggcctcagggatggcctgttcagctgctgggtgactcgggtccaggtgcctcaccacctgctcgttgcctttgggctcagtgaagagtctggagtttatctggagtgaggtggccggttcttggtgggatctgagcaggtggaggcaatgcccagagctgtggcagccaccttgcagccgtgaagcaccagtgggaatgacagtcaagagaaccacggagatgccagcccctggacccacagcagcagcacctgcttccagactcagagtgtgagaaaaaaataaactcctatttgtttatggcaag

SEQ ID NO: 659 - DNA, 355 bp, Artificial
  Synthetic oligonucleotide
taccttggctatccccctctgagttcttgccttgattctcctgttactgtcccgcgaacccacatccctacaaagcaggaaagtatgcttgggagaggccaagtgagtggggaatcagcccaaagccaggcgtccagggtctccctcacctgaagctgactttttccccaccttggacagagggcgggagatgccatccccactgaacccagtgctttcaccagccatattagctcccactcaccccccgtcgtggaagcctcggccgtcacacctgcagggccggggcgtgcatggcctcagggatggcctgttcagctgctgggtgactcgggtccaggtgcctcaccacctg

SEQ ID NO: 660 - DNA, 656 bp, Artificial
  Synthetic oligonucleotide
gtaagaagcagggtctttcttatgttttaaggaaagccctgtggctgctgggtgggggaccagctggaggggcaggagggcagcaggtgactcattacaaggctggggccatcatcctgtgagagctgggcatgaccagtgcaggtcagtggggttgagggtacagaccagtgggacccacagacggctcgggagtgaccaagcctctgctgagctgcccaggtcccctctggtggacacctcctacccggagccccccaaggtggtgccaaagctagaccaccatacagccagaggcctccaggccctacccacgacagcccagctggcttctgcccagccaccgtcacacacagagggcagccgtccccatggtccctagaggcggttgaggaccactgtgcctggagtcatctgtggctataaaccaggaggagaaggctgcccaccccctgccccagagatggggaggctggggccacccggtggatttgggcaggtcccagcttccaggatcatgaggtgaaaacgtgaagggaccctagaggccatggggacccaggcacagagcggcggcctctcatcctccccatggtcaaggaggtcagtgccttcccggggtggattacggatggtagtatcttccttctcctcag

SEQ ID NO: 661 - DNA, 260 bp, Artificial
  Synthetic oligonucleotide
gctggacacttcgtggagggctccaaagccggcagatcccggggccgcctctgtctctcccaggccctgcgtgttgcggtgagaggagcatttgtgtctctgtggtttgctgctggagctggtgaccgggagagaaacaagggagacaagggtgcccagacaggtgcggggctcagccaggaggcagaagacgtggacgtgtcccgggccaggagggtcacagatgcaccacaaggcactctgtgtggcactgggaacag

SEQ ID NO: 662 - DNA, 1258 bp, Artificial
  Synthetic oligonucleotide
gaattctgggagtcagtctgcaagggtggtgggcgttgctcacctgggagaagcctttagagtgggcgttgagcaggccattagctcgtgccctgaggaggtgcatgggcggcatgggctctccatggaaattatgtgggcgcgaatggatgtggctctgcgctcacctgggcgaggacttctggccggtgccggggcactctgcatgaccctggcagaatcgagctgccctgactatgaaaggggaagaagagcatgcctgaccctccaccggcaccccacccctcactgctccacctggggcctgcctctgcgggtggctgggtcctggctgactgttgtgactgttgaggccctgggggggtggcgcatgggagttaggaggactggccaggtggggcccactatgcacccacccccagtgtcaggtgcttctcctctcctcctccaccacctcctcctcctcctcctcatcatcatcctcacttgttgaggacgtcctgtgtgccaagtggtttatatgcccagcctcatttaatcctcagaatgactccatgaggtagctactaaaaccccccacttaacagatgaggaaactgaggcctagagaagctcaacaagttgcctaagttccaagtttcctctcccaactctcctaccctctcctcttccttctcctttctcccattcttccctgcctcttccctaactagacaattttttattgagtgtctcccaggtgcaggcatgagccaggtgctgggaaaatcatgataacccagctccttctggtcattttctcagctggttagaggctgggaggacacgcaagttcagctccagccgactggggcattggtggtagcccctggagacattgtgcaatggggctacgaggctgcatctggctccagggaagcgtgttgcaatccatgagtgatgtctgccatgcgtacaggcatggagagtgaggcgcctgtactgtctttctgtagaccctagactggtggggcctctgaaatgcatccagacactgtgctgggtgtgttgcatggccctcccaaccaattcagtatttttctccccattttccagggagaaatctaaggcgtcagaatgtaaggttcttattggaacccaggctccagggtccctggttttctgtgacatcatgctgcaggaccctgtttctctctttgctttggctgctggggagctcagaagggagctttaggcttgctctcagtcaccacattag

SEQ ID NO: 663 - DNA, 274 bp, Artificial
  Synthetic oligonucleotide
tcgccgtctcctttgggctctgtctcctccctgctgtgcttcctgaggagcaggccggatgtaagttatcaactataaataaaaccaagacttccgttctggctctcactctagtttcctggtgcattttttttttttaaagttcttaatcaagggaggggatactcctaactgaagatgacatcagcatcagctggccccggggggcaggcccccagcccccaggcccgtgtgggccctgaatgcccccattatgaggggtaacctcattaca

SEQ ID NO: 664 - DNA, 1179 bp, Artificial
  Synthetic oligonucleotide
ccccatgttaacggcccccagtgtggactgtcagctccatgaaggcagggccctacttatctcgttcacagcacaaggccgggcacacagtaggtgctcactcaacattcctgggatcaatgggaaatgactgtcggggaaccctctgcagccgtccttgtcgagggccccagatggggtgtgggtggcccctccccatccagatggtgttggaggggctgggggccaggcatggcgagcaggccgaggctgcaggtggacatccctgggactggagctgctgggggccaggctgcagttccagcccaggtcaggtctcatgtgaggcctccgtgaaacaagaatttctctctccgtttccttctcctgtctgactcacactttcgttttgaagttccccctttctgccagtgctttgcctgaggttacggagtggtcaagcgaggccagcagggcgtggagaccaggaggaagctgggctgcagtttcattcacaaaaacacgacccgcccgcttcctgtgtcctgcctgggctgcccggcccgcagccctacagccagttcacagggtgtttgcaagtttgcaggggccagtgagggtgctcctggggtttaagaggcttgagtttgtccaccccacggcctctgtcaggacccccccttcccgccactatgcttctgtctcccacggtgcctcccagctcacccccacaggggcctggcgcagagcctcaaactcaggattctataggagctgagggttgggtctgagcaccttggcgcttcccctggccccactgacccatccttgtttcagcacagagctgggaggcccagggaggatggcctctgctgactggtccagctccctctgtggttcccacctctcagtgtggggtggatccaagggggagggaagagaaggggatgggaagaaaacgatgcctgttggggcacaggctcctaaacccaacctcgtatcgcctcctgcgagtagcttccaggtgtccacagggagcccggggtcatgctggcatcattcattctccacgcatcagatgatcctgtggcccctcagtgccaggccccactggccctctgcgcacatcagtgactctgatgttctcccccaccgcatgctgccaatctgatggtggagacagaacagcagtcccggatg

SEQ ID NO: 665 - DNA, 169 bp, Artificial
  Synthetic oligonucleotide
gtggaggcaatgcccagagctgtggcagccaccttgcagccgtgaagcaccagtgggaatgacagtcaagagaaccacggagatgccagcccctggacccacagcagcagcacctgcttccagactcagagtgtgagaaaaaaataaactcctatttgtttatggcaag

SEQ ID NO: 666 - DNA, 124 bp, Artificial
  Synthetic oligonucleotide
agacaaggtctagctctgtgatgcaggccggaggacagtggtgtgatcacagctcactgcagccttgaactcctgggttccagcaatcctcccacctcagcctccttagtaggcgtggctacag

SEQ ID NO: 667 - DNA, 142 bp, Artificial
  Synthetic oligonucleotide
gtgtgtaccaccatgtccagccctaaatttcattctttttaatttcaatattgttatgtgttttctaatgttttataacttattggtatggtagatgtacatgtatacaaattaaaagaaaatttatatatattttactggg

SEQ ID NO: 668 - DNA, 660 bp, Artificial
  Synthetic oligonucleotide
gccaacaacttcactttccacactcagtgccacgaagtgcagctctaagctggggatttctgtgcagagatgatccactgagtgcaacccaccaccgtgcggacaccacccctgcagaatcatctgtgaaaacaaccccaggcccagacataggggccagctaagcttcgtagccctcgaaatacagggagtgccccctctggaccctcgagcccacagtccatccaccacagaggtgtctgctgctcatcagatagttcctaccaagaaaatgctgtgtgaacccatctgtgtggcaaaccggcacggggagaaagctgacttccaaggacgtctaccaactgtcacttgcaaaccagaacttgcctctttgtagatgaagactggcagggctgaagaaatgatctcatgttgaaattaatgatgagcttcagggtgaggtgactcagttcgaatgctgttgaatgttggtgtcatgggacttttacaagaagtaaaactgggctataaaaatgatccccttcccctcactagagaagggaggttctattcctctctctgtctttccctctctctatatataccaaaggtcaaatctttggtattttgcattgagtctttaattattcattcactttgacctagtaattgcacttcaga

SEQ ID NO: 669 - DNA, 31 bp, Artificial
  Synthetic oligonucleotide
ctgagctctgtgtgatttctggacacttctg

SEQ ID NO: 670 - DNA, 78 bp, Artificial
  Synthetic oligonucleotide
ctcgttgcctttgggctcagtgaagagtctggagtttatctggagtgaggtggccggttcttggtgggatctgagcag

SEQ ID NO: 671 - DNA, 94 bp, Artificial
  Synthetic oligonucleotide
agtccattcaggagcaggaaagttcatctcagaccctaaatccagccacgtcatgccacgcttaacacctctaacaacttcccctggcacttag

SEQ ID NO: 672 - DNA, 74 bp, Artificial
  Synthetic oligonucleotide
gacagcgtctggctccttccctcggctcatggccctcagaatctgcgtcacatacaccccagctctcccgatag

SEQ ID NO: 673 - DNA, 95 bp, Artificial
  Synthetic oligonucleotide
gtctctgcactcgctgttgcctctgcctggaacagtctccctcctggtgtcattgtctccgtggtgtgtccttcctgaccttccacctccaccag

SEQ ID NO: 674 - DNA, 96 bp, Artificial
  Synthetic oligonucleotide
gtgccgacacttccctgaccccagtaacctcttctcttgggtgggtgaatgccacctgctgatgtctgatttattcatcggttttcttgtctgtag

SEQ ID NO: 675 - DNA, 48 bp, Artificial
  Synthetic oligonucleotide
tctgtcccccttggggacagggactcgttgctcatgttcacccggcag

SEQ ID NO: 676 - DNA, 22 bp, Artificial
  Synthetic oligonucleotide
ctcaggggtttgggcatttttg

SEQ ID NO: 677 - DNA, 77 bp, Artificial
  Synthetic oligonucleotide
tgactgcatgaggctgtacgtatctgcagcctgccccttttcatggtgtttatccactcacacagtgatgagcagtg

SEQ ID NO: 678 - DNA, 74 bp, Artificial
  Synthetic oligonucleotide
taatggaagacagcaaaagaagtttggagattcctggtttaaagcatttaaagcctctgtgaaaatttgcccag

SEQ ID NO: 679 - protein, 313 aa, Homo sapiens
MALRICVTYTPALPIGLCTRCCLCLEQSPSWCHCLRGVSFLTFHLHQSVPLGDRDSLLMFTRQAGHFVEGSKAGRSRGRLCLSQALRVAVRGAFVSLWFAAGAGDRERNKGDKGAQTGAGLSQEAEDVDVSRARRVTDAPQGTLCGTGNRNSGSQSARAVGVAHLGEAFRVGVEQAISSCPEEVHGRHGLSMEIMWARMDVALRSPGRGLLAGAGALCVTLAESSCPDYERGRRACLTLHRHPTPHCSTWGLPLRVAGSWLTVVTVEALGGWRMGVRRTGQVGPTMHPPPVSGASPLLLHHLLLLLLIIILTC

SEQ ID NO: 680 - protein, 313 aa, Homo sapiens
MALRICVTYTPALPIGLCTRCCLCLEQSPSWCHCLRGVSFLTFHLHQSVPLGDRDSLLMFTRQAGHFVEGSKAGRSRGRLCLSQALRVAVRGAFVSLWFAAGAGDRERNKGDKGAQTGAGLSQEAEDVDVSRARRVTDAPQGTLCGTGNRNSGSQSARVVGVAHLGEAFRVGVEQAISSCPEEVHGRHGLSMEIMWARMDVALRSPGRGLLAGAGALCMTLAESSCPDYERGRRACLTLHRHPTPHCSTWGLPLRVAGSWLTVVTVEALGGWRMGVRRTGQVGPTMHPPPVSGASPLLLHHLLLLLLIIILTC

SEQ ID NO: 681 - protein, 313 aa, Homo sapiens
MALRICVTYTPALPIGLCTRCCLCLEQSPSWCHCLRGVSFLTFHLHQSVPLGDRDSLLMFTRQAGHFVEGSKAGRSRGRLCLSQALRVAVRGAFVSLWFAAGAGDRERNKGDKGAQTGAGLSQEAEDVDVSRARRVTDAPQGTLCGTGNRNSGSQSARAVGVAHLGEAFRVGVEQAISSCPEEVHGRHGLSMEIMWARMDVALRSPGRGLLAGAGALCMTLAESSCPDYERGRRACLTLHRHPTPHCSTWGLPLRVAGSWLTVVTVEALGGWRMGVRRTGQVGPTMHPPPVSGASPLLLHHLLLLLLIIILTC

SEQ ID NO: 682 - protein, 313 aa, Homo sapiens
MALRICVTYTPALPIGLCTRCCLCLEQSPSWCHCLRGVSFLTFHLHQSVPLGDRDSLLMFTRQAGHFVEGSKAGRSRGRLCLSQALRVAVRGAFVSLWFAAGAGDRERNKGDKGAQTGAGLSQEAEDVDVSRARRVTDAPQGTLCGTGNRNSGSQSARAVGVAHLGEAFRVGVEQAISSCPEEVHGRHGLSMEIMWAQMDVALRSPGRGLLAGAGALCMTLAESSCPDYERGRRACLTLHRHPTPHCSTWGLPLRVAGSWLTVVTVEALGRWRMGVRRTGQVGPTMHPPPVSGASPLLLHHLLLLLLIIILTC

SEQ ID NO: 683 - protein, 313 aa, Homo sapiens; identical to SEQ ID NO: 680

SEQ ID NO: 684 - protein, 255 aa, Homo sapiens
MFTRQAGHFVEGSKAGRSRGRLCLSQALRVAVRGAFVSLWFAAGAGDRERNKGDKGAQTGAGLSQEAEDVDVSRARRVTDAPQGTLCGTGNRNSGSQSARVVGVAHLGEAFRVGVEQAISSCPEEVHGRHGLSMEIMWARMDVALRSPGRGLLAGAGALCMTLAESSCPDYERGRRACLTLHRHPTPHCSTWGLPLRVAGSWLTVVTVEALGGWRMGVRRTGQVGPTMHPPPVSGASPLLLHHLLLLLLIIILTC

SEQ ID NO: 685 - protein, 191 aa, Homo sapiens
MSDLFIGFLVCSLSPLGTGTRCSCSPGRNSGSQSARVVGVAHLGEAFRVGVEQAISSCPEEVHGRHGLSMEIMWARMDVALRSPGRGLLAGAGALCMTLAESSCPDYERGRRACLTLHRHPTPHCSTWGLPLRVAGSWLTVVTVEALGGWRMGVRRTGQVGPTMHPPPVSGASPLLLHHLLLLLLIIILTC

SEQ ID NO: 686 - protein, 122 aa, Homo sapiens
MEIMWARMDVALRSPGRGLLAGAGALCMTLAESSCPDYERGRRACLTLHRHPTPHCSTWGLPLRVAGSWLTVVTVEALGGWRMGVRRTGQVGPTMHPPPVSGASPLLLHHLLLLLLIIILTC

SEQ ID NO: 687 - protein, 111 aa, Homo sapiens
MKAGPYLSRSQHKAGHTVGAHSTFLGSMGNDCRGTLCSRPCRGPQMGCGWPLPIQMVLEGLGARHGEQAEAAGGHPWDWSCWGPGCSSSPGQVSCEASVKQEFLSPFPSPV

SEQ ID NO: 688 - protein, 70 aa, Homo sapiens
MPSPLNPVLSPAILAPTHPPSWKPRPSHLQGRGVHGLRDGLFSCWVTRVQVPHHLLVAFGLSEESGVYLE

SEQ ID NO: 689 - protein, 255 aa, Homo sapiens
MFTRQAGHFVEGSKAGRSRGRLCLSQALRVAVRGAFVSLWFAAGAGDRERNKGDKGAQTGAGLSQEAEDVDVSRARRVTDAPQGTLCGTGNRNSGSQSARAVGVAHLGEAFRVGVEQAISSCPEEVHGRHGLSMEIMWAQMDVALRSPGRGLLAGAGALCMTLAESSCPDYERGRRACLTLHRHPTPHCSTWGLPLRVAGSWLTVVTVEALGRWRMGVRRTGQVGPTMHPPPVSGASPLLLHHLLLLLLIIILTC

SEQ ID NO: 690 - protein, 313 aa, Homo sapiens; identical to SEQ ID NO: 679

SEQ ID NO: 691 - protein, 59 aa, Homo sapiens
MPSPLNPVLSPAILAPTHPPSWKPRPSHLQGRGVHGLRDGLFSCWVTRVQVPHHLLSSV

SEQ ID NO: 692 - protein, 56 aa, Homo sapiens
MVFIHSHSDEQWWRQCPELWQPPCSREAPVGMTVKRTTEMPAPGPTAAAPASRLRV

SEQ ID NO: 693 - DNA, 2195 bp, Homo sapiens
caaagcctgggcccgtgggggacgcacatggtcctgttcgtactccaggatggcggcgtaaagggcccgctgctcccgttcctccggggtcagggcgacttggctgcaaaacctcctggggagaaaggcacgcggtgggtgccggggccaggccctccccgcagcggccccaggggcgggcaggagtcccacctgttggcggcctcctggagccgcagccggcgctcctccatctttctctggagctgggtgcagagtcaaggggccgagcgtgggatctgagcgggccctcggttcccaaccccgtcccacacccggagaggccgggacgtcccagggacctcctctcggtgaggggctgtccccagggaggcctcctccagtggcgtcagctctctggaaatgtgacaagctgctgtctagaccccaggaagcccagtggtgtctggacaccagaggagtctctctcatcctcccggattgctctgaggccaggagctttgtgactctgccccctgaagcttctggaagatctcgggtggcagaaaaggagagagctttcctccttcatcggagtatacacggcggtgtcggccggcaggctgggggatgggagcagctgcaggcatggttggcttcaggcgtgttttccctgcaagccatgggtaaccaggggtcaagcggtgggccacatcccacagaggagatgcgggcttgggggatgccccaggagagccgcctactgcaggagacccaccaagcttggcggccgtcgactgggccctctccagacactgctgtgctagtttcagcatcttggaggtgtcggggggcacagtttccccagcttctgggggagggacaagaaggctggtcacagtcggctctaccactgttacttactgctgagataaaatgaggcaacggaaaaggcaggcaagcccactgcccccctcagcacccccactgaccccgggcaagcccactgcccccccatcccctcactgaccctggggcaagcccactgcccccccatcccctcaccccgggtaagcccactgcccctcccgtcccccaactgactgaccctaggcaagcccactgcccccccatcccctcaccccgggtaagcccactgccccttccaccccccactgaccccgggcaagccgactattcctcatggaccccaggcaaggcccctgcccccaccatggaccccaggcaagtccccccacccacgcatttctaatcatctgccctggttttgcctcctgagtctgttaaggctgtgtgcccctcatcgaggcccgtcacagcctcgaccctaaacaggcctttagtgctcactcagcttcacttgcaactgcaggcctctgggaagtggccgttttacagagacaaggacgtgctgaggggatcgcctcacccatctcccaccggctgtgtccccaaagtcctgccttcccgtagcttggcatggagcacctctgcgcgaccatggacctgctcacacagcccttctgcgcgccgtgggagctgcctctctgtgactcgcccctggacccaccgccccagcgcctgacccacctccctgctgcccttcacagaaaacttctcatagactcccattttctcatcccgccccgatttagcccccgactccccccggaaactgcccttacccgtccccaccttgccagacacggtgggccactggagttcctctgtcttctgggactttgctctccccaggggatcctctgccactcctccacccaactcctcaatcttggagcgccagagctcagccgagctcaccggctccctagggagctggggcaactgttagctccccctgacctgtgtgatcctacgtccagtggctgccccgacctctgtgatcccacgtccaggggctcccccgacctctgtgatcccacgtccagtggctcctccgacctctgtgctcccacgtccagtggctcccccgacctctgtgctcccacgtccagtggctcccccgacctctgtgctcccacgtccagtgggtccccctgacctctgtgatcccacgtccagtggctccccctgacctctgtgctctatgtccagtggctccccctgacctctgtgatcctatgtgcagcggctgctggcctctcaaacttaatgtgttcattgcggaacttgct

SEQ ID NO: 694 - DNA, 1796 bp, Homo sapiens
caaagcctgggcccgtgggggacgcacatggtcctgttcgtactccaggatggcggcgtaaagggcccgctgctcccgttcctccggggtcagggcgacttggctgcaaaacctcctggggagaaaggcacgcggtgggtgccggggccaggccctccccgcagcggccccaggggcgggcaggagtcccacctgttggcggcctcctggagccgcagccggcgctcctccatctttctctggagctgggtgcagagtcaaggggccgagcgtgggatctgagcgggccctcggttcccaaccccgtcccacacccggagaggccgggacgtcccagggacctcctctcggtgaggggctgtccccagggaggcctcctccagtggcgtcagctctctggaaatgtgacaagctgctgtctagaccccaggaagcccagtggtgtctggacaccagaggagtctctctcatcctcccggattgctctgaggccaggagctttgtgactctgccccctgaagcttctggaagatctcgggtggcagaaaaggagagagctttcctccttcatcggagtatacacggcggtgtcggccggcaggctgggggatgggagcagctgcaggcatggttggcttcaggcgtgttttccctgcaagccatgggtaaccaggggtcaagcggtgggccacatcccacagaggagatgcgggcttgggggatgccccaggagagccgcctactgcaggagacccaccaagcttggcggccgtcgactgggccctctccagacactgctgtgctagtttcagcatcttggaggtgtcggggggcacagtttccccagcttctgggggagggacaagaaggctggtcacagtcggctctaccactgttacttactgctgagataaaatgaggcaacggaaaaggcaggcaagcccactgcccccctcagcacccccactgaccccgggcaagcccactgcccccccatcccctcactgaccctggggcaagcccactgcccccccatcccctcaccccgggtaagcccactgcccctcccgtcccccaactgactgaccctaggcaagcccactgcccccccatcccctcaccccgggtaagcccactgccccttccaccccccactgaccccgggcaagccgactattcctcatggaccccaggcaaggcccctgcccccaccatggaccccaggcaagtccccccacccacgcatttctaatcatctgccctggttttgcctcctgagtctgttaaggctgtgtgcccctcatcgaggcccgtcacagcctcgaccctaaacaggcctttagtgctcactcagcttcacttgcaactgcaggcctctgggaagtggccgttttacagagacaaggacgtgctgaggggatcgcctcacccatctcccaccggctgtgtccccaaagtcctgccttcccgtagcttggcatggagcacctctgcgcgaccatggacctgctcacacagcccttctgcgcgccgtgggagctgcctctctgtgactcgcccgacctctgtgctcccacgtccagtggctcccccgacctctgtgctcccacgtccagtggctcccccgacctctgtgctcccacgtccagtgggtccccctgacctctgtgatcccacgtccagtggctccccctgacctctgtgctctatgtccagtggctccccctgacctctgtgatcctatgtgcagcggctgctggcctctcaaacttaatgtgttcattgcggaacttgct

SEQ ID NO: 695 - DNA, 368 bp, Artificial
  Synthetic oligonucleotide
caaagcctgggcccgtgggggacgcacatggtcctgttcgtactccaggatggcggcgtaaagggcccgctgctcccgttcctccggggtcagggcgacttggctgcaaaacctcctggggagaaaggcacgcggtgggtgccggggccaggccctccccgcagcggccccaggggcgggcaggagtcccacctgttggcggcctcctggagccgcagccggcgctcctccatctttctctggagctgggtgcagagtcaaggggccgagcgtgggatctgagcgggccctcggttcccaaccccgtcccacacccggagaggccgggacgtcccagggacctcctctcggtgaggggctgtccccag

SEQ ID NO: 696 - DNA, 130 bp, Artificial
  Synthetic oligonucleotide
ggaggcctcctccagtggcgtcagctctctggaaatgtgacaagctgctgtctagaccccaggaagcccagtggtgtctggacaccagaggagtctctctcatcctcccggattgctctgaggccaggag

SEQ ID NO: 697 - DNA, 167 bp, Artificial
  Synthetic oligonucleotide
ctttgtgactctgccccctgaagcttctggaagatctcgggtggcagaaaaggagagagctttcctccttcatcggagtatacacggcggtgtcggccggcaggctgggggatgggagcagctgcaggcatggttggcttcaggcgtgttttccctgcaagccatgg

SEQ ID NO: 698 - DNA, 267 bp, Artificial
  Synthetic oligonucleotide
gtaaccaggggtcaagcggtgggccacatcccacagaggagatgcgggcttgggggatgccccaggagagccgcctactgcaggagacccaccaagcttggcggccgtcgactgggccctctccagacactgctgtgctagtttcagcatcttggaggtgtcggggggcacagtttccccagcttctgggggagggacaagaaggctggtcacagtcggctctaccactgttacttactgctgagataaaatgaggcaacggaaaag

SEQ ID NO: 699 - DNA, 440 bp, Artificial
  Synthetic oligonucleotide
gcaggcaagcccactgcccccctcagcacccccactgaccccgggcaagcccactgcccccccatcccctcactgaccctggggcaagcccactgcccccccatcccctcaccccgggtaagcccactgcccctcccgtcccccaactgactgaccctaggcaagcccactgcccccccatcccctcaccccgggtaagcccactgccccttccaccccccactgaccccgggcaagccgactattcctcatggaccccaggcaaggcccctgcccccaccatggaccccaggcaagtccccccacccacgcatttctaatcatctgccctggttttgcctcctgagtctgttaaggctgtgtgcccctcatcgaggcccgtcacagcctcgaccctaaacaggcctttagtgctcactcagcttcacttgcaactgcag

SEQ ID NO: 700 - DNA, 188 bp, Artificial
  Synthetic oligonucleotide
gcctctgggaagtggccgttttacagagacaaggacgtgctgaggggatcgcctcacccatctcccaccggctgtgtccccaaagtcctgccttcccgtagcttggcatggagcacctctgcgcgaccatggacctgctcacacagcccttctgcgcgccgtgggagctgcctctctgtgactcgccc

SEQ ID NO: 701 - DNA, 399 bp, Artificial
  Synthetic oligonucleotide
ctggacccaccgccccagcgcctgacccacctccctgctgcccttcacagaaaacttctcatagactcccattttctcatcccgccccgatttagcccccgactccccccggaaactgcccttacccgtccccaccttgccagacacggtgggccactggagttcctctgtcttctgggactttgctctccccaggggatcctctgccactcctccacccaactcctcaatcttggagcgccagagctcagccgagctcaccggctccctagggagctggggcaactgttagctccccctgacctgtgtgatcctacgtccagtggctgccccgacctctgtgatcccacgtccaggggctcccccgacctctgtgatcccacgtccagtggctcctcc

SEQ ID NO: 702 - DNA, 236 bp, Artificial
  Synthetic oligonucleotide
gacctctgtgctcccacgtccagtggctcccccgacctctgtgctcccacgtccagtggctcccccgacctctgtgctcccacgtccagtgggtccccctgacctctgtgatcccacgtccagtggctccccctgacctctgtgctctatgtccagtggctccccctgacctctgtgatcctatgtgcagcggctgctggcctctcaaacttaatgtgttcattgcggaacttgct

SEQ ID NO: 703 - protein, 193 aa, Homo sapiens
MEHLCATMDLLTQPFCAPWELPLCDSPLDPPPQRLTHLPAALHRKLLIDSHFLIPPRFSPRLPPETALTRPHLARHGGPLEFLCLLGLCSPQGILCHSSTQLLNLGAPELSRAHRLPRELGQLLAPPDLCDPTSSGCPDLCDPTSRGSPDLCDPTSSGSSDLCAPTSSGSPDLCAPTSSGSPDLCAPTSSGSP

SEQ ID NO: 704 - protein, 84 aa, Homo sapiens [sequence omitted]

SEQ ID NO: 705 - DNA, 9380 bp, Homo sapiens
gggcgagcgcctccgtccccggatgtgagctccggctgcccgcggtcccgagccagcggcggcgcgggcggcggcggcgggcaccgggcaccgcggcgggcgggcagacgggcgggcatggggggagcgccgagcggccccggcggccgggccggcatcaccgcggcgtctctccgctagaggaggggacaagccagttctcctttgcagcaaaaaattacatgtatatattattaagataatatatacattggattttatttttttaaaaagtttattttgctccatttttgaaaaagagagagcttgggtggcgagcggttttttttttaaatcaattatccttattttctgttatttgtccccgtccctccccacccccctgctgaagcgagaataagggcagggaccgcggctcctacctcttggtgatccccttccccattccgcccccgcctcaacgcccagcacagtgccctgcacacagtagtcgctcaataaatgttcgtggatgatgatgatgatgatgatgaaaaaaatgcagcatcaacggcagcagcaagcggaccacgcgaacgaggcaaactatgcaagaggcaccagacttcctctttctggtgaaggaccaacttctcagccgaatagctccaagcaaactgtcctgtcttggcaagctgcaatcgatgctgctagacaggccaaggctgcccaaactatgagcacctctgcacccccacctgtaggatctctctcccaaagaaaacgtcagcaatacgccaagagcaaaaaacagggtaactcgtccaacagccgacctgcccgcgcccttttctgtttatcactcaataaccccatccgaagagcctgcattagtatagtggaatggaaaccatttgacatatttatattattggctatttttgccaattgtgtggccttagctatttacatcccattccctgaagatgattctaattcaacaaatcataacttggaaaaagtagaatatgccttcctgattatttttacagtcgagacatttttgaagattatagcgtatggattattgctacatcctaatgcttatgttaggaatggatggaatttactggattttgttatagtaatagtaggattgtttagtgtaattttggaacaattaaccaaagaaacagaaggcgggaaccactcaagcggcaaatctggaggctttgatgtcaaagccctccgtgcctttcgagtgttgcgaccacttcgactagtgtcaggagtgcccagtttacaagttgtcctgaactccattataaaagccatggttcccctccttcacatagcccttttggtattatttgtaatcataatctatgctattataggattggaactttttattggaaaaatgcacaaaacatgtttttttgctgactcagatatcgtagctgaagaggacccagctccatgtgcgttctcagggaatggacgccagtgtactgccaatggcacggaatgtaggagtggctgggttggcccgaacggaggcatcaccaactttgataactttgcctttgccatgcttactgtgtttcagtgcatcaccatggagggctggacagacgtgctctactgggtaaatgatgcgataggatgggaatggccatgggtgtattttgttagtctgatcatccttggctcatttttcgtccttaacctggttcttggtgtccttagtggagaattctcaaaggaaagagagaaggcaaaagcacggggagatttccagaagctccgggagaagcagcagctggaggaggatctaaagggctacttggattggatcacccaagctgaggacatcgatccggagaatgaggaagaaggaggagaggaaggcaaacgaaatactagcatgcccaccagcgagactgagtctgtgaacacagagaacgtcagcggtgaaggcgagaaccgaggctgctgtggaagtctctggtgctggtggagacggagaggcgcggccaaggcggggccctctgggtgtcggcggtggggtcaagccatctcaaaatccaaactcagccgacgctggcgtcgctggaaccgattcaatcgcagaagatgtagggccgccgtgaagtctgtcacgttttactggctggttatcgtcctggtgtttctgaacaccttaaccatttcctctgagcactacaatcagccagattggttgacacagattcaagatattgccaacaaagtcctcttggctctgttcacctgcgagatgctggtaaaaatgtacagcttgggcctccaagcatatttcgtctctcttttcaaccggtttgattgcttcgtggtgtgtggtggaatcactgagacgatcttggtggaactggaaatcatgtctcccctggggatctctgtgtttcggtgtgtgcgcctcttaagaatcttcaaagtgaccaggcactggacttccctgagcaacttagtggcatccttattaaactccatgaagtccatcgcttcgctgttgcttctgctttttctcttcattatcatcttttccttgcttgggatgcagctgtttggcggcaagtttaattttgatgaaacgcaaaccaagcggagcacctttgacaatttccctcaagcacttctcacagtgttccagatcctgacaggcgaagactggaatgctgtgatgtacgatggcatcatggcttacgggggcccatcctcttcaggaatgatcgtctgcatctacttcatcatcctcttcatttgtggtaactatattctactgaatgtcttcttggccatcgctgtagacaatttggctgatgctgaaagtctgaacactgctcagaaagaagaagcggaagaaaaggagaggaaaaagattgccagaaaagagagcctagaaaataaaaagaacaacaaaccagaagtcaaccagatagccaacagtgacaacaaggttacaattgatgactatagagaagaggatgaagacaaggacccctatccgccttgcgatgtgccagtaggggaagaggaagaggaagaggaggaggatgaacctgaggttcctgccggaccccgtcctcgaaggatctcggagttgaacatgaaggaaaaaattgcccccatccctgaagggagcgctttcttcattcttagcaagaccaacccgatccgcgtaggctgccacaagctcatcaaccaccacatcttcaccaacctcatccttgtcttcatcatgctgagcagcgctgccctggccgcagaggaccccatccgcagccactccttccggaacacgatactgggttactttgactatgccttcacagccatctttactgttgagatcctgttgaagatgacaacttttggagctttcctccacaaaggggccttctgcaggaactacttcaatttgctggatatgctggtggttggggtgtctctggtgtcatttgggattcaatccagtgccatctccgttgtgaagattctgagggtcttaagggtcctgcgtcccctcagggccatcaacagagcaaaaggacttaagcacgtggtccagtgcgtcttcgtggccatccggaccatcggcaacatcatgatcgtcaccaccctcctgcagttcatgtttgcctgtatcggggtccagttgttcaaggggaagttctatcgctgtacggatgaagccaaaagtaaccctgaagaatgcaggggacttttcatcctctacaaggatggggatgttgacagtcctgtggtccgtgaacggatctggcaaaacagtgatttcaacttcgacaacgtcctctctgctatgatggcgctcttcacagtctccacgtttgagggctggcctgcgttgctgtataaagccatcgactcgaatggagagaacatcggcccaatctacaaccaccgcgtggagatctccatcttcttcatcatctacatcatcattgtagctttcttcatgatgaacatctttgtgggctttgtcatcgttacatttcaggaacaaggagaaaaagagtataagaactgtgagctggacaaaaatcagcgtcagtgtgttgaatacgccttgaaagcacgtcccttgcggagatacatccccaaaaacccctaccagtacaagttctggtacgtggtgaactcttcgcctttcgaatacatgatgtttgtcctcatcatgctcaacacactctgcttggccatgcagcactacgagcagtccaagatgttcaatgatgccatggacattctgaacatggtcttcaccggggtgttcaccgtcgagatggttttgaaagtcatcgcatttaagcctaaggggtattttagtgacgcctggaacacgtttgactccctcatcgtaatcggcagcattatagacgtggccctcagcgaagcagacccaactgaaagtgaaaatgtccctgtcccaactgctacacctgggaactctgaagagagcaatagaatctccatcacctttttccgtcttttccgagtgatgcgattggtgaagcttctcagcaggggggaaggcatccggacattgctgtggacttttattaagtcctttcaggcgctcccgtatgtggccctcctcatagccatgctgttcttcatctatgcggtcattggcatgcagatgtttgggaaagttgccatgagagataacaaccagatcaataggaacaataacttccagacgtttccccaggcggtgctgctgctcttcaggtgtgcaacaggtgaggcctggcaggagatcatgctggcctgtctcccagggaagctctgtgaccctgagtcagattacaaccccggggaggagtatacatgtgggagcaactttgccattgtctatttcatcagtttttacatgctctgtgcatttctgatcatcaatctgtttgtggctgtcatcatggataatttcgactatctgacccgggactggtctattttggggcctcaccatttagatgaattcaaaagaatatggtcagaatatgaccctgaggcaaagggaaggataaaacaccttgatgtggtcactctgcttcgacgcatccagcctcccctggggtttgggaagttatgtccacacagggtagcgtgcaagagattagttgccatgaacatgcctctcaacagtgacgggacagtcatgtttaatgcaaccctgtttgctttggttcgaacggctcttaagatcaagaccgaagggaacctggagcaagctaatgaagaacttcgggctgtgataaagaaaatttggaagaaaaccagcatgaaattacttgaccaagttgtccctccagctggtgatgatgaggtaaccgtggggaagttctatgccactttcctgatacaggactactttaggaaattcaagaaacggaaagaacaaggactggtgggaaagtaccctgcgaagaacaccacaattgccctacaggcgggattaaggacactgcatgacattgggccagaaatccggcgtgctatatcgtgtgatttgcaagatgacgagcctgaggaaacaaaacgagaagaagaagatgatgtgttcaaaagaaatggtgccctgcttggaaaccatgtcaatcatgttaatagtgataggagagattcccttcagcagaccaataccacccaccgtcccctgcatgtccaaaggccttcaattccacctgcaagtgatactgagaaaccgctgtttcctccagcaggaaattcggtgtgtcataaccatcataaccataattccataggaaagcaagttcccacctcaacaaatgccaatctcaataatgccaatatgtccaaagctgcccatggaaagcggcccagcattgggaaccttgagcatgtgtctgaaaatgggcatcattcttcccacaagcatgaccgggagcctcagagaaggtccagtgtgaaaagaacccgctattatgaaacttacattaggtccgactcaggagatgaacagctcccaactatttgccgggaagacccagagatacatggctatttcagggacccccactgcttgggggagcaggagtatttcagtagtgaggaatgctacgaggatgacagctcgcccacctggagcaggcaaaactatggctactacagcagatacccaggcagaaacatcgactctgagaggccccgaggctaccatcatccccaaggattcttggaggacgatgactcgcccgtttgctatgattcacggagatctccaaggagacgcctactacctcccaccccagcatcccaccggagatcctccttcaactttgagtgcctgcgccggcagagcagccaggaagaggtcccgtcgtctcccatcttcccccatcgcacggccctgcctctgcatctaatgcagcaacagatcatggcagttgccggcctagattcaagtaaagcccagaagtactcaccgagtcactcgacccggtcgtgggccacccctccagcaacccctccctaccgggactggacaccgtgctacacccccctgatccaagtggagcagtcagaggccctggaccaggtgaacggcagcctgccgtccctgcaccgcagctcctggtacacagacgagcccgacatctcctaccggactttcacaccagccagcctgactgtccccagcagcttccggaacaaaaacagcgacaagcagaggagtgcggacagcttggtggaggcagtcctgatatccgaaggcttgggacgctatgcaagggacccaaaatttgtgtcagcaacaaaacacgaaatcgctgatgcctgtgacctcaccatcgacgagatggagagtgcagccagcaccctgcttaatgggaacgtgcgtccccgagccaacggggatgtgggccccctctcacaccggcaggactatgagctacaggactttggtcctggctacagcgacgaagagccagaccctgggagggatgaggaggacctggcggatgaaatgatatgcatcaccaccttgtagcccccagcgaggggcagactggctctggcctcaggtggggcgcaggagagccaggggaaaagtgcctcatagttaggaaagtttaggcactagttgggagtaatattcaattaattagacttttgtataagagatgtcatgcctcaagaaagccataaacctggtaggaacaggtcccaagcggttgagcctggcagagtaccatgcgctcggccccagctgcaggaaacagcaggccccgccctctcacagaggatgggtgaggaggccagacctgccctgccccattgtccagatgggcactgctgtggagtctgcttctcccatgtaccagggcaccaggcccacccaactgaaggcatggcggcggggtgcaggggaaagttaaaggtgatgacgatcatcacacctgtgtcgttacctcagccatcggtctagcatatcagtcactgggcccaacatatccatttttaaaccctttcccccaaatacactgcgtcctggttcctgtttagctgttctgaaatacggtgtgtaagtaagtcagaacccagctaccagtgattattgcgagggcaatgggacctcataaataaggttttctgtgatgtgacgccagtttacataagagaatatcactccgatggtcggtttctgactgtcacgctaagggcaactgtaaactggaataataatgcactcgcaaccaggtaaacttagatacactagtttgtttaaaattatagatttactgtacatgacttgtaatatactataatttgtatttgtaaagagatggtctatattttgtaattactgtattgtatttgaactgcagcaatatccatgggtcctaataattgtagttccccactaaaatctagaaattattagtatttttactcgggctatccagaagtagaagaaatagagccaattctcatttattcagcgaaaatcctctggggttaaaattttaagtttgaaagaacttgacactacagaaatttttctaaaatattttgagtcactataaacctatcatctttccacaagatataccagatgactatttgcagtcttttctttgggcaagagttccatgattttgatactgtacctttggatccaccatgggttgcaactgtctttggttttgtttgtttgacttgaaccaccctctggtaagtaagtgaattacagagcaggtccagctggctgctctgccccttgggtatccatagttacggttttctctgtggcccacccagggtgttttttgcatcgctggtgcagaaatgcataggtggatgagatatagctgctcttgtcctctggggactggtggtgctgcttaagaaataaggggtgctggggacagaggagcaacgtggtgatctataggattggagtgtcggggtctgtacaaatcgtattgttgccttttacaaaactgctgtactgtatgttctctttgagggcttttgtatgcaattgaatgagggctgaagaagttttcattagaatgcactcacactctgactgtacgtcctgatgaaaacccacttttggataattagaaccgtcaaggcttcattttctgtcaacagaattaggccgactgtcaagttaccttggcagggattccctgcaatcaaaaagatagatgataggtagcaattttggtccaaaatttttaatagtatacagacaacctgttaattttttttttttttttttttgtaaataacaaacaccactttgttatgaagaccttacaaacctcttcttaagacattcttactctgatccaggcaaaaacacttcaaggtttgtaaatgactctttcctgacataaatccttttttattaaaatgcaaaatgttcttcagaataaaactgtgtaataatttttatacttgggagtgctccttgcacagagctgtcatttgccagtgagagcctccgacggggcaggtactgtgccagggcagctctgaaattatggatattcttatcctcctggttccttcggtgccaatggtaacctaataccagccgcagggagcgccatttctcctaaagggctacaccactgtcaacattatcctggactctgtgtctctctctgttgggtcttgtggcatcacatcaggccaaaattgccagaccaggaccctaagtgtctgatagaggcgatgatcttttccaaagtcagtacttacaaactggcattcttacaggctgcaccatttcctagtatgtctgctttaagcctggttcaacctctcatcgaatattaaatttttctttgtaagaaaaa

SEQ ID NO: 706 - DNA, 8957 bp, Homo sapiens
gggcagcccgccgctggagcgcgcttaaccctttggagcccgcagcacagtgccctgcacacagtagtcgctcaataaatgttcgtggatgatgatgatgatgatgatgaaaaaaatgcagcatcaacggcagcagcaagcggaccacgcgaacgaggcaaactatgcaagaggcaccagacttcctctttctggtgaaggaccaacttctcagccgaatagctccaagcaaactgtcctgtcttggcaagctgcaatcgatgctgctagacaggccaaggctgcccaaactatgagcacctctgcacccccacctgtaggatctctctcccaaagaaaacgtcagcaatacgccaagagcaaaaaacagggtaactcgtccaacagccgacctgcccgcgcccttttctgtttatcactcaataaccccatccgaagagcctgcattagtatagtggaatggaaaccatttgacatatttatattattggctatttttgccaattgtgtggccttagctatttacatcccattccctgaagatgattctaattcaacaaatcataacttggaaaaagtagaatatgccttcctgattatttttacagtcgagacatttttgaagattatagcgtatggattattgctacatcctaatgcttatgttaggaatggatggaatttactggattttgttatagtaatagtaggattgtttagtgtaattttggaacaattaaccaaagaaacagaaggcgggaaccactcaagcggcaaatctggaggctttgatgtcaaagccctccgtgcctttcgagtgttgcgaccacttcgactagtgtcaggagtgcccagtttacaagttgtcctgaactccattataaaagccatggttcccctccttcacatagcccttttggtattatttgtaatcataatctatgctattataggattggaactttttattggaaaaatgcacaaaacatgtttttttgctgactcagatatcgtagctgaagaggacccagctccatgtgcgttctcagggaatggacgccagtgtactgccaatggcacggaatgtaggagtggctgggttggcccgaacggaggcatcaccaactttgataactttgcctttgccatgcttactgtgtttcagtgcatcaccatggagggctggacagacgtgctctactgggtaaatgatgcgataggatgggaatggccatgggtgtattttgttagtctgatcatccttggctcatttttcgtccttaacctggttcttggtgtccttagtggagaattctcaaaggaaagagagaaggcaaaagcacggggagatttccagaagctccgggagaagcagcagctggaggaggatctaaagggctacttggattggatcacccaagctgaggacatcgatccggagaatgaggaagaaggaggagaggaaggcaaacgaaatactagcatgcccaccagcgagactgagtctgtgaacacagagaacgtcagcggtgaaggcgagaaccgaggctgctgtggaagtctctggtgctggtggagacggagaggcgcggccaaggcggggccctctgggtgtcggcggtggggtcaagccatctcaaaatccaaactcagccgacgctggcgtcgctggaaccgattcaatcgcagaagatgtagggccgccgtgaagtctgtcacgttttactggctggttatcgtcctggtgtttctgaacaccttaaccatttcctctgagcactacaatcagccagattggttgacacagattcaagatattgccaacaaagtcctcttggctctgttcacctgcgagatgctggtaaaaatgtacagcttgggcctccaagcatatttcgtctctcttttcaaccggtttgattgcttcgtggtgtgtggtggaatcactgagacgatcttggtggaactggaaatcatgtctcccctggggatctctgtgtttcggtgtgtgcgcctcttaagaatcttcaaagtgaccaggcactggacttccctgagcaacttagtggcatccttattaaactccatgaagtccatcgcttcgctgttgcttctgctttttctcttcattatcatcttttccttgcttgggatgcagctgtttggcggcaagtttaattttgatgaaacgcaaaccaagcggagcacctttgacaatttccctcaagcacttctcacagtgttccagatcctgacaggcgaagactggaatgctgtgatgtacgatggcatcatggcttacgggggcccatcctcttcaggaatgatcgtctgcatctacttcatcatcctcttcatttgtggtaactatattctactgaatgtcttcttggccatcgctgtagacaatttggctgatgctgaaagtctgaacactgctcagaaagaagaagcggaagaaaaggagaggaaaaagattgccagaaaagagagcctagaaaataaaaagaacaacaaaccagaagtcaaccagatagccaacagtgacaacaaggttacaattgatgactatagagaagaggatgaagacaaggacccctatccgccttgcgatgtgccagtaggggaagaggaagaggaagaggaggaggatgaacctgaggttcctgccggaccccgtcctcgaaggatctcggagttgaacatgaaggaaaaaattgcccccatccctgaagggagcgctttcttcattcttagcaagaccaacccgatccgcgtaggctgccacaagctcatcaaccaccacatcttcaccaacctcatccttgtcttcatcatgctgagcagcgctgccctggccgcagaggaccccatccgcagccactccttccggaacacgatactgggttactttgactatgccttcacagccatctttactgttgagatcctgttgaagatgacaacttttggagctttcctccacaaaggggccttctgcaggaactacttcaatttgctggatatgctggtggttggggtgtctctggtgtcatttgggattcaatccagtgccatctccgttgtgaagattctgagggtcttaagggtcctgcgtcccctcagggccatcaacagagcaaaaggacttaagcacgtggtccagtgcgtcttcgtggccatccggaccatcggcaacatcatgatcgtcaccaccctcctgcagttcatgtttgcctgtatcggggtccagttgttcaaggggaagttctatcgctgtacggatgaagccaaaagtaaccctgaagaatgcaggggacttttcatcctctacaaggatggggatgttgacagtcctgtggtccgtgaacggatctggcaaaacagtgatttcaacttcgacaacgtcctctctgctatgatggcgctcttcacagtctccacgtttgagggctggcctgcgttgctgtataaagccatcgactcgaatggagagaacatcggcccaatctacaaccaccgcgtggagatctccatcttcttcatcatctacatcatcattgtagctttcttcatgatgaacatctttgtgggctttgtcatcgttacatttcaggaacaaggagaaaaagagtataagaactgtgagctggacaaaaatcagcgtcagtgtgttgaatacgccttgaaagcacgtcccttgcggagatacatccccaaaaacccctaccagtacaagttctggtacgtggtgaactcttcgcctttcgaatacatgatgtttgtcctcatcatgctcaacacactctgcttggccatgcagcactacgagcagtccaagatgttcaatgatgccatggacattctgaacatggtcttcaccggggtgttcaccgtcgagatggttttgaaagtcatcgcatttaagcctaaggggtattttagtgacgcctggaacacgtttgactccctcatcgtaatcggcagcattatagacgtggccctcagcgaagcagacccaactgaaagtgaaaatgtccctgtcccaactgctacacctgggaactctgaagagagcaatagaatctccatcacctttttccgtcttttccgagtgatgcgattggtgaagcttctcagcaggggggaaggcatccggacattgctgtggacttttattaagtcctttcaggcgctcccgtatgtggccctcctcatagccatgctgttcttcatctatgcggtcattggcatgcagatgtttgggaaagttgccatgagagataacaaccagatcaataggaacaataacttccagacgtttccccaggcggtgctgctgctcttcaggtgtgcaacaggtgaggcctggcaggagatcatgctggcctgtctcccagggaagctctgtgaccctgagtcagattacaaccccggggaggagtatacatgtgggagcaactttgccattgtctatttcatcagtttttacatgctctgtgcatttctgatcatcaatctgtttgtggctgtcatcatggataatttcgactatctgacccgggactggtctattttggggcctcaccatttagatgaattcaaaagaatatggtcagaatatgaccctgaggcaaagggaaggataaaacaccttgatgtggtcactctgcttcgacgcatccagcctcccctggggtttgggaagttatgtccacacagggtagcgtgcaagagattagttgccatgaacatgcctctcaacagtgacgggacagtcatgtttaatgcaaccctgtttgctttggttcgaacggctcttaagatcaagaccgaagggaacctggagcaagctaatgaagaacttcgggctgtgataaagaaaatttggaagaaaaccagcatgaaattacttgaccaagttgtccctccagctggtgatgatgaggtaaccgtggggaagttctatgccactttcctgatacaggactactttaggaaattcaagaaacggaaagaacaaggactggtgggaaagtaccctgcgaagaacaccacaattgccctacaggcgggattaaggacactgcatgacattgggccagaaatccggcgtgctatatcgtgtgatttgcaagatgacgagcctgaggaaacaaaacgagaagaagaagatgatgtgttcaaaagaaatggtgccctgcttggaaaccatgtcaatcatgttaatagtgataggagagattcccttcagcagaccaataccacccaccgtcccctgcatgtccaaaggccttcaattccacctgcaagtgatactgagaaaccgctgtttcctccagcaggaaattcggtgtgtcataaccatcataaccataattccataggaaagcaagttcccacctcaacaaatgccaatctcaataatgccaatatgtccaaagctgcccatggaaagcggcccagcattgggaaccttgagcatgtgtctgaaaatgggcatcattcttcccacaagcatgaccgggagcctcagagaaggtccagtgtgaaaagaacccgctattatgaaacttacattaggtccgactcaggagatgaacagctcccaactatttgccgggaagacccagagatacatggctatttcagggacccccactgcttgggggagcaggagtatttcagtagtgaggaatgctacgaggatgacagctcgcccacctggagcaggcaaaactatggctactacagcagatacccaggcagaaacatcgactctgagaggccccgaggctaccatcatccccaaggattcttggaggacgatgactcgcccgtttgctatgattcacggagatctccaaggagacgcctactacctcccaccccagcatcccaccggagatcctccttcaactttgagtgcctgcgccggcagagcagccaggaagaggtcccgtcgtctcccatcttcccccatcgcacggccctgcctctgcatctaatgcagcaacagatcatggcagttgccggcctagattcaagtaaagcccagaagtactcaccgagtcactcgacccggtcgtgggccacccctccagcaacccctccctaccgggactggacaccgtgctacacccccctgatccaagtggagcagtcagaggccctggaccaggtgaacggcagcctgccgtccctgcaccgcagctcctggtacacagacgagcccgacatctcctaccggactttcacaccagccagcctgactgtccccagcagcttccggaacaaaaacagcgacaagcagaggagtgcggacagcttggtggaggcagtcctgatatccgaaggcttgggacgctatgcaagggacccaaaatttgtgtcagcaacaaaacacgaaatcgctgatgcctgtgacctcaccatcgacgagatggagagtgcagccagcaccctgcttaatgggaacgtgcgtccccgagccaacggggatgtgggccccctctcacaccggcaggactatgagctacaggactttggtcctggctacagcgacgaagagccagaccctgggagggatgaggaggacctggcggatgaaatgatatgcatcaccaccttgtagcccccagcgaggggcagactggctctggcctcaggtggggcgcaggagagccaggggaaaagtgcctcatagttaggaaagtttaggcactagttgggagtaatattcaattaattagacttttgtataagagatgtcatgcctcaagaaagccataaacctggtaggaacaggtcccaagcggttgagcctggcagagtaccatgcgctcggccccagctgcaggaaacagcaggccccgccctctcacagaggatgggtgaggaggccagacctgccctgccccattgtccagatgggcactgctgtggagtctgcttctcccatgtaccagggcaccaggcccacccaactgaaggcatggcggcggggtgcaggggaaagttaaaggtgatgacgatcatcacacctgtgtcgttacctcagccatcggtctagcatatcagtcactgggcccaacatatccatttttaaaccctttcccccaaatacactgcgtcctggttcctgtttagctgttctgaaatacggtgtgtaagtaagtcagaacccagctaccagtgattattgcgagggcaatgggacctcataaataaggttttctgtgatgtgacgccagtttacataagagaatatcactccgatggtcggtttctgactgtcacgctaagggcaactgtaaactggaataataatgcactcgcaaccaggtaaacttagatacactagtttgtttaaaattatagatttactgtacatgacttgtaatatactataatttgtatttgtaaagagatggtctatattttgtaattactgtattgtatttgaactgcagcaatatccatgggtcctaataattgtagttccccactaaaatctagaaattattagtatttttactcgggctatccagaagtagaagaaatagagccaattctcatttattcagcgaaaatcctctggggttaaaattttaagtttgaaagaacttgacactacagaaatttttctaaaatattttgagtcactataaacctatcatctttccacaagatataccagatgactatttgcagtcttttctttgggcaagagttccatgattttgatactgtacctttggatccaccatgggttgcaactgtctttggttttgtttgtttgacttgaaccaccctctggtaagtaagtgaattacagagcaggtccagctggctgctctgccccttgggtatccatagttacggttttctctgtggcccacccagggtgttttttgcatcgctggtgcagaaatgcataggtggatgagatatagctgctcttgtcctctggggactggtggtgctgcttaagaaataaggggtgctggggacagaggagcaacgtggtgatctataggattggagtgtcggggtctgtacaaatcgtattgttgccttttacaaaactgctgtactgtatgttctctttgagggcttttgtatgcaattgaatgagggctgaagaagttttcattagaatgcactcacactctgactgtacgtcctgatgaaaacccacttttggataattagaaccgtcaaggcttcattttctgtcaacagaattaggccgactgtcaagttaccttggcagggattccctgcaatcaaaaagatagatgataggtagcaattttggtccaaaatttttaatagtatacagacaacctgttaattttttttttttttttttttgtaaataacaaacaccactttgttatgaagaccttacaaacctcttcttaagacattcttactctgatccaggcaaaaacacttcaaggtttgtaaatgactctttcctgacataaatccttttttattaaaatgcaaaatgttcttcagaataaaactgtgtaataatttttatacttgggagtgctccttgcacagagctgtcatttgccagtgagagcctccgacggggcaggtactgtgccagggcagctctgaaattatggatattcttatcctcctggttccttcggtgccaatggtaacctaataccagccgcagggagcgccatttctcctaaagggctacaccactgtcaacattatcctggactctgtgtctctctctgttgggtcttgtggcatcacatcaggccaaaattgccagaccaggaccctaagtgtctgatagaggcgatgatcttttccaaagtcagtacttacaaactggcattcttacaggctgcaccatttcctagtatgtctgctttaagcctggttcaacctctcatcgaatattaaatttttctttgtaagaaaaa

SEQ ID NO: 707 - DNA, 9458 bp, Homo sapiens
gggcgagcgcctccgtccccggatgtgagctccggctgcccgcggtcccgagccagcggcggcgcgggcggcggcggcgggcaccgggcaccgcggcgggcgggcagacgggcgggcatggggggagcgccgagcggccccggcggccgggccggcatcaccgcggcgtctctccgctagaggaggggacaagccagttctcctttgcagcaaaaaattacatgtatatattattaagataatatatacattggattttatttttttaaaaagtttattttgctccatttttgaaaaagagagagcttgggtggcgagcggttttttttttaaatcaattatccttattttctgttatttgtccccgtccctccccacccccctgctgaagcgagaataagggcagggaccgcggctcctacctcttggtgatccccttccccattccgcccccgcctcaacgcccagcacagtgccctgcacacagtagtcgctcaataaatgttcgtggatgatgatgatgatgatgatgaaaaaaatgcagcatcaacggcagcagcaagcggaccacgcgaacgaggcaaactatgcaagaggcaccagacttcctctttctggtgaaggaccaacttctcagccgaatagctccaagcaaactgtcctgtcttggcaagctgcaatcgatgctgctagacaggccaaggctgcccaaactatgagcacctctgcacccccacctgtaggatctctctcccaaagaaaacgtcagcaatacgccaagagcaaaaaacagggtaactcgtccaacagccgacctgcccgcgcccttttctgtttatcactcaataaccccatccgaagagcctgcattagtatagtggaatggaaaccatttgacatatttatattattggctatttttgccaattgtgtggccttagctatttacatcccattccctgaagatgattctaattcaacaaatcataacttggaaaaagtagaatatgccttcctgattatttttacagtcgagacatttttgaagattatagcgtatggattattgctacatcctaatgcttatgttaggaatggatggaatttactggattttgttatagtaatagtaggattgtttagtgtaattttggaacaattaaccaaagaaacagaaggcgggaaccactcaagcggcaaatctggaggctttgatgtcaaagccctccgtgcctttcgagtgttgcgaccacttcgactagtgtcaggagtgcccagtttacaagttgtcctgaactccattataaaagccatggttcccctccttcacatagcccttttggtattatttgtaatcataatctatgctattataggattggaactttttattggaaaaatgcacaaaacatgtttttttgctgactcagatatcgtagctgaagaggacccagctccatgtgcgttctcagggaatggacgccagtgtactgccaatggcacggaatgtaggagtggctgggttggcccgaacggaggcatcaccaactttgataactttgcctttgccatgcttactgtgtttcagtgcatcaccatggagggctggacagacgtgctctactgggtaaatgatgcgataggatgggaatggccatgggtgtattttgttagtctgatcatccttggctcatttttcgtccttaacctggttcttggtgtccttagtggagaattctcaaaggaaagagagaaggcaaaagcacggggagatttccagaagctccgggagaagcagcagctggaggaggatctaaagggctacttggattggatcacccaagctgaggacatcgatccggagaatgaggaagaaggaggagaggaaggcaaacgaaatactagcatgcccaccagcgagactgagtctgtgaacacagagaacgtcagcggtgaaggcgagaaccgaggctgctgtggaagtctctggtgctggtggagacggagaggcgcggccaaggcggggccctctgggtgtcggcggtggggtcaagccatctcaaaatccaaactcagccgacgctggcgtcgctggaaccgattcaatcgcagaagatgtagggccgccgtgaagtctgtcacgttttactggctggttatcgtcctggtgtttctgaacaccttaaccatttcctctgagcactacaatcagccagattggttgacacagattcaagatattgccaacaaagtcctcttggctctgttcacctgcgagatgctggtaaaaatgtacagcttgggcctccaagcatatttcgtctctcttttcaaccggtttgattgcttcgtggtgtgtggtggaatcactgagacgatcttggtggaactggaaatcatgtctcccctggggatctctgtgtttcggtgtgtgcgcctcttaagaatcttcaaagtgaccaggcactggacttccctgagcaacttagtggcatccttattaaactccatgaagtccatcgcttcgctgttgcttctgctttttctcttcattatcatcttttccttgcttgggatgcagctgtttggcggcaagtttaattttgatgaaacgcaaaccaagcggagcacctttgacaatttccctcaagcacttctcacagtgttccagatcctgacaggcgaagactggaatgctgtgatgtacgatggcatcatggcttacgggggcccatcctcttcaggaatgatcgtctgcatctacttcatcatcctcttcatttgtggtaactatattctactgaatgtcttcttggccatcgctgtagacaatttggctgatgctgaaagtctgaacactgctcagaaagaagaagcggaagaaaaggagaggaaaaagattgccagaaaagagagcctagaaaataaaaagaacaacaaaccagaagtcaaccagatagccaacagtgacaacaaggttacaattgatgactatagagaagaggatgaagacaaggacccctatccgccttgcgatgtgccagtaggggaagaggaagaggaagaggaggaggatgaacctgaggttcctgccggaccccgtcctcgaaggatctcggagttgaacatgaaggaaaaaattgcccccatccctgaagggagcgctttcttcattcttagcaagaccaacccgatccgcgtaggctgccacaagctcatcaaccaccacatcttcaccaacctcatccttgtcttcatcatgctgagcagcgctgccctggccgcagaggaccccatccgcagccactccttccggaacacgatactgggttactttgactatgccttcacagccatctttactgttgagatcctgttgaagatgacaacttttggagctttcctccacaaaggggccttctgcaggaactacttcaatttgctggatatgctggtggttggggtgtctctggtgtcatttgggattcaatccagtgccatctccgttgtgaagattctgagggtcttaagggtcctgcgtcccctcagggccatcaacagagcaaaaggacttaagcacgtggtccagtgcgtcttcgtggccatccggaccatcggcaacatcatgatcgtcaccaccctcctgcagttcatgtttgcctgtatcggggtccagttgttcaaggggaagttctatcgctgtacggatgaagccaaaagtaaccctgaagaatgcaggggacttttcatcctctacaaggatggggatgttgacagtcctgtggtccgtgaacggatctggcaaaacagtgatttcaacttcgacaacgtcctctctgctatgatggcgctcttcacagtctccacgtttgagggctggcctgcgttgctgtataaagccatcgactcgaatggagagaacatcggcccaatctacaaccaccgcgtggagatctccatcttcttcatcatctacatcatcattgtagctttcttcatgatgaacatctttgtgggctttgtcatcgttacatttcaggaacaaggagaaaaagagtataagaactgtgagctggacaaaaatcagcgtcagtgtgttgaatacgccttgaaagcacgtcccttgcggagatacatccccaaaaacccctaccagtacaagttctggtacgtggtgaactcttcgcctttcgaatacatgatgtttgtcctcatcatgctcaacacactctgcttggccatgcagcactacgagcagtccaagatgttcaatgatgccatggacattctgaacatggtcttcaccggggtgttcaccgtcgagatggttttgaaagtcatcgcatttaagcctaaggggtattttagtgacgcctggaacacgtttgactccctcatcgtaatcggcagcattatagacgtggccctcagcgaagcagacccaactgaaagtgaaaatgtccctgtcccaactgctacacctgggaactctgaagagagcaatagaatctccatcacctttttccgtcttttccgagtgatgcgattggtgaagcttctcagcaggggggaaggcatccggacattgctgtggacttttattaagtcctttcaggcgctcccgtatgtggccctcctcatagccatgctgttcttcatctatgcggtcattggcatgcagatgtttgggaaagttgccatgagagataacaaccagatcaataggaacaataacttccagacgtttccccaggcggtgctgctgctcttcaggtgtgcaacaggtgaggcctggcaggagatcatgctggcctgtctcccagggaagctctgtgaccctgagtcagattacaaccccggggaggagtatacatgtgggagcaactttgccattgtctatttcatcagtttttacatgctctgtgcatttctgatcatcaatctgtttgtggctgtcatcatggataatttcgactatctgacccgggactggtctattttggggcctcaccatttagatgaattcaaaagaatatggtcagaatatgaccctgaggcaaagggaaggataaaacaccttgatgtggtcactctgcttcgacgcatccagcctcccctggggtttgggaagttatgtccacacagggtagcgtgcaagagattagttgccatgaacatgcctctcaacagtgacgggacagtcatgtttaatgcaaccctgtttgctttggttcgaacggctcttaagatcaagaccgaagggaacctggagcaagctaatgaagaacttcgggctgtgataaagaaaatttggaagaaaaccagcatgaaattacttgaccaagttgtccctccagctggtgatgatgaggtaaccgtggggaagttctatgccactttcctgatacaggactactttaggaaattcaagaaacggaaagaacaaggactggtgggaaagtaccctgcgaagaacaccacaattgccctacaggcgggattaaggacactgcatgacattgggccagaaatccggcgtgctatatcgtgtgatttgcaagatgacgagcctgaggaaacaaaacgagaagaagaagatgatgtgttcaaaagaaatggtgccctgcttggaaaccatgtcaatcatgttaatagtgataggagagattcccttcagcagaccaataccacccaccgtcccctgcatgtccaaaggccttcaattccacctgcaagtgatactgagaaaccgctgtttcctccagcaggaaattcggtgtgtcataaccatcataaccataattccataggaaagcaagttcccacctcaacaaatgccaatctcaataatgccaatatgtccaaagctgcccatggaaagcggcccagcattgggaaccttgagcatgtgtctgaaaatgggcatcattcttcccacaagcatgaccgggagcctcagagaaggtccagtgtgaaaagaacccgctattatgaaacttacattaggtccgactcaggagatgaacagctcccaactatttgccgggaagacccagagatacatggctatttcagggacccccactgcttgggggagcaggagtatttcagtagtgaggaatgctacgaggatgacagctcgcccacctggagcaggcaaaactatggctactacagcagatacccaggcagaaacatcgactctgagaggccccgaggctaccatcatccccaaggattcttggaggacgatgactcgcccgtttgctatgattcacggagatctccaaggagacgcctactacctcccaccccagcatcccaccggagatcctccttcaactttgagtgcctgcgccggcagagcagccaggaagaggtcccgtcgtctcccatcttcccccatcgcacggccctgcctctgcatctaatgcagcaacagatcatggcagttgccggcctagattcaagtaaagcccagaagtactcaccgagtcactcgacccggtcgtgggccacccctccagcaacccctccctaccgggactggacaccgtgctacacccccctgatccaagtggagcagtcagaggccctggaccaggtgaacggcagcctgccgtccctgcaccgcagctcctggtacacagacgagcccgacatctcctaccggactttcacaccagccagcctgactgtccccagcagcttccggaacaaaaacagcgacaagcagaggagtgcggacagcttggtggaggcagtcctgatatccgaaggcttgggacgctatgcaagggacccaaaatttgtgtcagcaacaaaacacgaaatcgctgatgcctgtgacctcaccatcgacgagatggagagtgcagccagcaccctgcttaatgggaacgtgcgtccccgagccaacggggatgtgggccccctctcacaccggcaggactatgagctacaggactttggtcctggctacagcgacgaagagccagaccctgggagggatgaggaggacctggcggatgaaatgatatgcatcaccaccttgtagcccccagcgaggggcagactggctctggcctcaggtggggcgcaggagagccaggggaaaagtgcctcatagttaggaaagtttaggcactagttgggagtaatattcaattaattagacttttgtataagagatgtcatgcctcaagaaagccataaacctggtaggaacaggtcccaagcggttgagcctggcagagtaccatgcgctcggccccagctgcaggaaacagcaggccccgccctctcacagaggatgggtgaggaggccagacctgccctgccccattgtccagatgggcactgctgtggagtctgcttctcccatgtaccagggcaccaggcccacccaactgaaggcatggcggcggggtgcaggggaaagttaaaggtgatgacgatcatcacacctgtgtcgttacctcagccatcggtctagcatatcagtcactgggcccaacatatccatttttaaaccctttcccccaaatacactgcgtcctggttcctgtttagctgttctgaaatacggtgtgtaagtaagtcagaacccagctaccagtgattattgcgagggcaatgggacctcataaataaggttttctgtgatgtgacgccagtttacataagagaatatcactccgatggtcggtttctgactgtcacgctaagggcaactgtaaactggaataataatgcactcgcaaccaggtaaacttagatacactagtttgtttaaaattatagatttactgtacatgacttgtaatatactataatttgtatttgtaaagagatggtctatattttgtaattactgtattgtatttgaactgcagcaatatccatgggtcctaataattgtagttccccactaaaatctagaaattattagtatttttactcgggctatccagaagtagaagaaatagagccaattctcatttattcagcgaaaatcctctggggttaaaattttaagtttgaaagaacttgacactacagaaatttttctaaaatattttgagtcactataaacctatcatctttccacaagatataccagatgactatttgcagtcttttctttgggcaagagttccatgattttgatactgtacctttggatccaccatgggttgcaactgtctttggttttgtttgtttgacttgaaccaccctctggtaagtaagtgaattacagagcaggtccagctggctgctctgccccttgggtatccatagttacggttttctctgtggcccacccagggtgttttttgcatcgctggtgcagaaatgcataggtggatgagatatagctgctcttgtcctctggggactggtggtgctgcttaagaaataaggggtgctggggacagaggagcaacgtggtgatctataggattggagtgtcggggtctgtacaaatcgtattgttgccttttacaaaactgctgtactgtatgttctctttgagggcttttgtatgcaattgaatgagggctgaagaagttttcattagaatgcactcacactctgactgtacgtcctgatgaaaacccacttttggataattagaaccgtcaaggcttcattttctgtcaacagaattaggccgactgtcaagttaccttggcagggattccctgcaatcaaaaagatagatgataggtagcaattttggtccaaaatttttaatagtatacagacaacctgttaattttttttttttttttttttgtaaataacaaacaccactttgttatgaagaccttacaaacctcttcttaagacattcttactctgatccaggcaaaaacacttcaaggtttgtaaatgactctttcctgacataaatccttttttattaaaatgcaaaatgttcttcagaataaaactgtgtaataatttttatacttgggagtgctccttgcacagagctgtcatttgccagtgagagcctccgacggggcaggtactgtgccagggcagctctgaaattatggatattcttatcctcctggttccttcggtgccaatggtaacctaataccagccgcagggagcgccatttctcctaaagggctacaccactgtcaacattatcctggactctgtgtctctctctgttgggtcttgtggcatcacatcaggccaaaattgccagaccaggaccctaagtgtctgatagaggcgatgatcttttccaaagtcagtacttacaaactggcattcttacaggctgcaccattctagtgcctggacccaagtcctgtccacatctgttcacccctcacagggggctcacccagcaccacaccataaaatgtcagctatttgccaaaaggatggcatcagctctgctctctaccagggccaattctgccactgcccatgcc

SEQ ID NO: 708 - DNA, 8114 bp, Homo sapiens
gggcgagcgcctccgtccccggatgtgagctccggctgcccgcggtcccgagccagcggcggcgcgggcggcggcggcgggcaccgggcaccgcggcgggcgggcagacgggcgggcatggggggagcgccgagcggccccggcggccgggccggcatcaccgcggcgtctctccgctagaggaggggacaagccagttctcctttgcagcaaaaaattacatgtatatattattaagataatatatacattggattttatttttttaaaaagtttattttgctccatttttgaaaaagagagagcttgggtggcgagcggttttttttttaaatcaattatccttattttctgttatttgtccccgtccctccccacccccctgctgaagcgagaataagggcagggaccgcggctcctacctcttggtgatccccttccccattccgcccccgcctcaacgcccagcacagtgccctgcacacagtagtcgctcaataaatgttcgtggatgatgatgatgatgatgatgaaaaaaatgcagcatcaacggcagcagcaagcggaccacgcgaacgaggcaaactatgcaagaggcaccagacttcctctttctggtgaaggaccaacttctcagccgaatagctccaagcaaactgtcctgtcttggcaagctgcaatcgatgctgctagacaggccaaggctgcccaaactatgagcacctctgcacccccacctgtaggatctctctcccaaagaaaacgtcagcaatacgccaagagcaaaaaacagggtaactcgtccaacagccgacctgcccgcgcccttttctgtttatcactcaataaccccatccgaagagcctgcattagtatagtggaatggaaaccatttgacatatttatattattggctatttttgccaattgtgtggccttagctatttacatcccattccctgaagatgattctaattcaacaaatcataacttggaaaaagtagaatatgccttcctgattatttttacagtcgagacatttttgaagattatagcgtatggattattgctacatcctaatgcttatgttaggaatggatggaatttactggattttgttatagtaatagtaggattgtttagtgtaattttggaacaattaaccaaagaaacagaaggcgggaaccactcaagcggcaaatctggaggctttgatgtcaaagccctccgtgcctttcgagtgttgcgaccacttcgactagtgtcaggagtgcccagtttacaagttgtcctgaactccattataaaagccatggttcccctccttcacatagcccttttggtattatttgtaatcataatctatgctattataggattggaactttttattggaaaaatgcacaaaacatgtttttttgctgactcagatatcgtagctgaagaggacccagctccatgtgcgttctcagggaatggacgccagtgtactgccaatggcacggaatgtaggagtggctgggttggcccgaacggaggcatcaccaactttgataactttgcctttgccatgcttactgtgtttcagtgcatcaccatggagggctggacagacgtgctctactgggtaaatgatgcgataggatgggaatggccatgggtgtattttgttagtctgatcatccttggctcatttttcgtccttaacctggttcttggtgtccttagtggagaattctcaaaggaaagagagaaggcaaaagcacggggagatttccagaagctccgggagaagcagcagctggaggaggatctaaagggctacttggattggatcacccaagctgaggacatcgatccggagaatgaggaagaaggaggagaggaaggcaaacgaaatactagcatgcccaccagcgagactgagtctgtgaacacagagaacgtcagcggtgaaggcgagaaccgaggctgctgtggaagtctctggtgctggtggagacggagaggcgcggccaaggcggggccctctgggtgtcggcggtggggtcaagccatctcaaaatccaaactcagccgacgctggcgtcgctggaaccgattcaatcgcagaagatgtagggccgccgtgaagtctgtcacgttttactggctggttatcgtcctggtgtttctgaacaccttaaccatttcctctgagcactacaatcagccagattggttgacacagattcaagatattgccaacaaagtcctcttggctctgttcacctgcgagatgctggtaaaaatgtacagcttgggcctccaagcatatttcgtctctcttttcaaccggtttgattgcttcgtggtgtgtggtggaatcactgagacgatcttggtggaactggaaatcatgtctcccctggggatctctgtgtttcggtgtgtgcgcctcttaagaatcttcaaagtgaccaggcactggacttccctgagcaacttagtggcatccttattaaactccatgaagtccatcgcttcgctgttgcttctgctttttctcttcattatcatcttttccttgcttgggatgcagctgtttggcggcaagtttaattttgatgaaacgcaaaccaagcggagcacctttgacaatttccctcaagcacttctcacagtgttccagatcctgacaggcgaagactggaatgctgtgatgtacgatggcatcatggcttacgggggcccatcctcttcaggaatgatcgtctgcatctacttcatcatcctcttcatttgtggtaactatattctactgaatgtcttcttggccatcgctgtagacaatttggctgatgctgaaagtctgaacactgctcagaaagaagaagcggaagaaaaggagaggaaaaagattgccagaaaagagagcctagaaaataaaaagaacaacaaaccagaagtcaaccagatagccaacagtgacaacaaggttacaattgatgactatagagaagaggatgaagacaaggacccctatccgccttgcgatgtgccagtaggggaagaggaagaggaagaggaggaggatgaacctgaggttcctgccggaccccgtcctcgaaggatctcggagttgaacatgaaggaaaaaattgcccccatccctgaagggagcgctttcttcattcttagcaagaccaacccgatccgcgtaggctgccacaagctcatcaaccaccacatcttcaccaacctcatccttgtcttcatcatgctgagcagcgctgccctggccgcagaggaccccatccgcagccactccttccggaacacgatactgggttactttgactatgccttcacagccatctttactgttgagatcctgttgaagatgacaacttttggagctttcctccacaaaggggccttctgcaggaactacttcaatttgctggatatgctggtggttggggtgtctctggtgtcatttgggattcaatccagtgccatctccgttgtgaagattctgagggtcttaagggtcctgcgtcccctcagggccatcaacagagcaaaaggacttaagcacgtggtccagtgcgtcttcgtggccatccggaccatcggcaacatcatgatcgtcaccaccctcctgcagttcatgtttgcctgtatcggggtccagttgttcaaggggaagttctatcgctgtacggatgaagccaaaagtaaccctgaagaatgcaggggacttttcatcctctacaaggatggggatgttgacagtcctgtggtccgtgaacggatctggcaaaacagtgatttcaacttcgacaacgtcctctctgctatgatggcgctcttcacagtctccacgtttgagggctggcctgcgttgctgtataaagccatcgactcgaatggagagaacatcggcccaatctacaaccaccgcgtggagatctccatcttcttcatcatctacatcatcattgtagctttcttcatgatgaacatctttgtgggctttgtcatcgttacatttcaggaacaaggagaaaaagagtataagaactgtgagctggacaaaaatcagcgtcagtgtgttgaatacgccttgaaagcacgtcccttgcggagatacatccccaaaaacccctaccagtacaagttctggtacgtggtgaactcttcgcctttcgaatacatgatgtttgtcctcatcatgctcaacacactctgcttggccatgcagcactacgagcagtccaagatgttcaatgatgccatggacattctgaacatggtcttcaccggggtgttcaccgtcgagatggttttgaaagtcatcgcatttaagcctaaggggtattttagtgacgcctggaacacgtttgactccctcatcgtaatcggcagcattatagacgtggccctcagcgaagcagacccaactgaaagtgaaaatgtccctgtcccaactgctacacctgggaactctgaagagagcaatagaatctccatcacctttttccgtcttttccgagtgatgcgattggtgaagcttctcagcaggggggaaggcatccggacattgctgtggacttttattaagtcctttcaggcgctcccgtatgtggccctcctcatagccatgctgttcttcatctatgcggtcattggcatgcagatgtttgggaaagttgccatgagagataacaaccagatcaataggaacaataacttccagacgtttccccaggcggtgctgctgctcttcaggtgtgcaacaggtgaggcctggcaggagatcatgctggcctgtctcccagggaagctctgtgaccctgagtcagattacaaccccggggaggagtatacatgtgggagcaactttgccattgtctatttcatcagtttttacatgctctgtgcatttctgatcatcaatctgtttgtggctgtcatcatggataatttcgactatctgacccgggactggtctattttggggcctcaccatttagatgaattcaaaagaatatggtcagaatatgaccctgaggcaaagggaaggataaaacaccttgatgtggtcactctgcttcgacgcatccagcctcccctggggtttgggaagttatgtccacacagggtagcgtgcaagagattagttgccatgaacatgcctctcaacagtgacgggacagtcatgtttaatgcaaccctgtttgctttggttcgaacggctcttaagatcaagaccgaagggaacctggagcaagctaatgaagaacttcgggctgtgataaagaaaatttggaagaaaaccagcatgaaattacttgaccaagttgtccctccagctggtgatgatgaggtaaccgtggggaagttctatgccactttcctgatacaggactactttaggaaattcaagaaacggaaagaacaaggactggtgggaaagtaccctgcgaagaacaccacaattgccctacaggcgggattaaggacactgcatgacattgggccagaaatccggcgtgctatatcgtgtgatttgcaagatgacgagcctgaggaaacaaaacgagaagaagaagatgatgtgttcaaaagaaatggtgccctgcttggaaaccatgtcaatcatgttaatagtgataggagagattcccttcagcagaccaataccacccaccgtcccctgcatgtccaaaggccttcaattccacctgcaagtgatactgagaaaccgctgtttcctccagcaggaaattcggtgtgtcataaccatcataaccataattccataggaaagcaagttcccacctcaacaaatgccaatctcaataatgccaatatgtccaaagctgcccatggaaagcggcccagcattgggaaccttgagcatgtgtctgaaaatgggcatcattcttcccacaagcatgaccgggagcctcagagaaggtccagtgtgaaaagaacccgctattatgaaacttacattaggtccgactcaggagatgaacagctcccaactatttgccgggaagacccagagatacatggctatttcagggacccccactgcttgggggagcaggagtatttcagtagtgaggaatgctacgaggatgacagctcgcccacctggagcaggcaaaactatggctactacagcagatacccaggcagaaacatcgactctgagaggccccgaggctaccatcatccccaaggattcttggaggacgatgactcgcccgtttgctatgattcacggagatctccaaggagacgcctactacctcccaccccagcatcccaccggagatcctccttcaactttgagtgcctgcgccggcagagcagccaggaagaggtcccgtcgtctcccatcttcccccatcgcacggccctgcctctgcatctaatgcagcaacagatcatggcagttgccggcctagattcaagtaaagcccagaagtactcaccgagtcactcgacccggtcgtgggccacccctccagcaacccctccctaccgggactggacaccgtgctacacccccctgatccaagtggagcagtcagaggccctggaccaggtgaacggcagcctgccgtccctgcaccgcagctcctggtacacagacgagcccgacatctcctaccggactttcacaccagccagcctgactgtccccagcagcttccggaacaaaaacagcgacaagcagaggagtgcggacagcttggtggaggcagtcctgatatccgaaggcttgggacgctatgcaagggacccaaaatttgtgtcagcaacaaaacacgaaatcgctgatgcctgtgacctcaccatcgacgagatggagagtgcagccagcaccctgcttaatgggaacgtgcgtccccgagccaacggggatgtgggccccctctcacaccggcaggactatgagctacaggactttggtcctggctacagcgacgaagagccagaccctgggagggatgaggaggacctggcggatgaaatgatatgcatcaccaccttgtagcccccagcgaggggcagactggctctggcctcaggtggggcgcaggagagccaggggaaaagtgcctcatagttaggaaagtttaggcactagttgggagtaatattcaattaattagacttttgtataagagatgtcatgcctcaagaaagccataaacctggtaggaacaggtcccaagcggttgagcctggcagagtaccatgcgctcggccccagctgcaggaaacagcaggccccgccctctcacagaggatgggtgaggaggccagacctgccctgccccattgtccagatgggcactgctgtggagtctgcttctcccatgtaccagggcaccaggcccacccaactgaaggcatggcggcggggtgcaggggaaagttaaaggtgatgacgatcatcacacctgtgtcgttacctcagccatcggtctagcatatcagtcactgggcccaacatatccatttttaaaccctttcccccaaatacactgcgtcctggttcctgtttagctgttctgaaatacggtgtgtaagtaagtcagaacccagctaccagtgattattgcgagggcaatgggacctcataaataaggttttctgtgatgtgacgccagtttacataagagaatatcactccgatggtcggtttctgactgtcacgctaagggcaactgtaaactggaataataatgcactcgcaaccaggtaaacttagatacactagtttgtttaaaattatagatttactgtacatgacttgtaatatactataatttgtatttgtaaagagatggtctatattttgtaattactgtattgtatttgaactgcagcaatatccatgggtcctaataattgtagttccccactaaaatctagaaattattagtatttttactcgggctatccagaagtagaagaaatagagccaattctcatttattcagcgaaaatcctctggggttaaaattttaagtttgaaagaacttgacactacagaaatttttctaaaatattttgagtcactataaacctatcatctttccacaaga

SEQ ID NO: 709 - DNA, 7850 bp, Homo sapiens
gggcgagcgcctccgtccccggatgtgagctccggctgcccgcggtcccgagccagcggcggcgcgggcggcggcggcgggcaccgggcaccgcggcgggcgggcagacgggcgggcatggggggagcgccgagcggccccggcggccgggccggcatcaccgcggcgtctctccgctagaggaggggacaagccagttctcctttgcagcaaaaaattacatgtatatattattaagataatatatacattggattttatttttttaaaaagtttattttgctccatttttgaaaaagagagagcttgggtggcgagcggttttttttttaaatcaattatccttattttctgttatttgtccccgtccctccccacccccctgctgaagcgagaataagggcagggaccgcggctcctacctcttggtgatccccttccccattccgcccccgcctcaacgcccagcacagtgccctgcacacagtagtcgctcaataaatgttcgtggatgatgatgatgatgatgatgaaaaaaatgcagcatcaacggcagcagcaagcggaccacgcgaacgaggcaaactatgcaagaggcaccagacttcctctttctggtgaaggaccaacttctcagccgaatagctccaagcaaactgtcctgtcttggcaagctgcaatcgatgctgctagacaggccaaggctgcccaaactatgagcacctctgcacccccacctgtaggatctctctcccaaagaaaacgtcagcaatacgccaagagcaaaaaacagggtaactcgtccaacagccgacctgcccgcgcccttttctgtttatcactcaataaccccatccgaagagcctgcattagtatagtggaatggaaaccatttgacatatttatattattggctatttttgccaattgtgtggccttagctatttacatcccattccctgaagatgattctaattcaacaaatcataacttggaaaaagtagaatatgccttcctgattatttttacagtcgagacatttttgaagattatagcgtatggattattgctacatcctaatgcttatgttaggaatggatggaatttactggattttgttatagtaatagtaggattgtttagtgtaattttggaacaattaaccaaagaaacagaaggcgggaaccactcaagcggcaaatctggaggctttgatgtcaaagccctccgtgcctttcgagtgttgcgaccacttcgactagtgtcaggagtgcccagtttacaagttgtcctgaactccattataaaagccatggttcccctccttcacatagcccttttggtattatttgtaatcataatctatgctattataggattggaactttttattggaaaaatgcacaaaacatgtttttttgctgactcagatatcgtagctgaagaggacccagctccatgtgcgttctcagggaatggacgccagtgtactgccaatggcacggaatgtaggagtggctgggttggcccgaacggaggcatcaccaactttgataactttgcctttgccatgcttactgtgtttcagtgcatcaccatggagggctggacagacgtgctctactgggtaaatgatgcgataggatgggaatggccatgggtgtattttgttagtctgatcatccttggctcatttttcgtccttaacctggttcttggtgtccttagtggagaattctcaaaggaaagagagaaggcaaaagcacggggagatttccagaagctccgggagaagcagcagctggaggaggatctaaagggctacttggattggatcacccaagctgaggacatcgatccggagaatgaggaagaaggaggagaggaaggcaaacgaaatactagcatgcccaccagcgagactgagtctgtgaacacagagaacgtcagcggtgaaggcgagaaccgaggctgctgtggaagtctctggtgctggtggagacggagaggcgcggccaaggcggggccctctgggtgtcggcggtggggtcaagccatctcaaaatccaaactcagccgacgctggcgtcgctggaaccgattcaatcgcagaagatgtagggccgccgtgaagtctgtcacgttttactggctggttatcgtcctggtgtttctgaacaccttaaccatttcctctgagcactacaatcagccagattggttgacacagattcaagatattgccaacaaagtcctcttggctctgttcacctgcgagatgctggtaaaaatgtacagcttgggcctccaagcatatttcgtctctcttttcaaccggtttgattgcttcgtggtgtgtggtggaatcactgagacgatcttggtggaactggaaatcatgtctcccctggggatctctgtgtttcggtgtgtgcgcctcttaagaatcttcaaagtgaccaggcactggacttccctgagcaacttagtggcatccttattaaactccatgaagtccatcgcttcgctgttgcttctgctttttctcttcattatcatcttttccttgcttgggatgcagctgtttggcggcaagtttaattttgatgaaacgcaaaccaagcggagcacctttgacaatttccctcaagcacttctcacagtgttccagatcctgacaggcgaagactggaatgctgtgatgtacgatggcatcatggcttacgggggcccatcctcttcaggaatgatcgtctgcatctacttcatcatcctcttcatttgtggtaactatattctactgaatgtcttcttggccatcgctgtagacaatttggctgatgctgaaagtctgaacactgctcagaaagaagaagcggaagaaaaggagaggaaaaagattgccagaaaagagagcctagaaaataaaaagaacaacaaaccagaagtcaaccagatagccaacagtgacaacaaggttacaattgatgactatagagaagaggatgaagacaaggacccctatccgccttgcgatgtgccagtaggggaagaggaagaggaagaggaggaggatgaacctgaggttcctgccggaccccgtcctcgaaggatctcggagttgaacatgaaggaaaaaattgcccccatccctgaagggagcgctttcttcattcttagcaagaccaacccgatccgcgtaggctgccacaagctcatcaaccaccacatcttcaccaacctcatccttgtcttcatcatgctgagcagcgctgccctggccgcagaggaccccatccgcagccactccttccggaacacgatactgggttactttgactatgccttcacagccatctttactgttgagatcctgttgaagatgacaacttttggagctttcctccacaaaggggccttctgcaggaactacttcaatttgctggatatgctggtggttggggtgtctctggtgtcatttgggattcaatccagtgccatctccgttgtgaagattctgagggtcttaagggtcctgcgtcccctcagggccatcaacagagcaaaaggacttaagcacgtggtccagtgcgtcttcgtggccatccggaccatcggcaacatcatgatcgtcaccaccctcctgcagttcatgtttgcctgtatcggggtccagttgttcaaggggaagttctatcgctgtacggatgaagccaaaagtaaccctgaagaatgcaggggacttttcatcctctacaaggatggggatgttgacagtcctgtggtccgtgaacggatctggcaaaacagtgatttcaacttcgacaacgtcctctctgctatgatggcgctcttcacagtctccacgtttgagggctggcctgcgttgctgtataaagccatcgactcgaatggagagaacatcggcccaatctacaaccaccgcgtggagatctccatcttcttcatcatctacatcatcattgtagctttcttcatgatgaacatctttgtgggctttgtcatcgttacatttcaggaacaaggagaaaaagagtataagaactgtgagctggacaaaaatcagcgtcagtgtgttgaatacgccttgaaagcacgtcccttgcggagatacatccccaaaaacccctaccagtacaagttctggtacgtggtgaactcttcgcctttcgaatacatgatgtttgtcctcatcatgctcaacacactctgcttggccatgcagcactacgagcagtccaagatgttcaatgatgccatggacattctgaacatggtcttcaccggggtgttcaccgtcgagatggttttgaaagtcatcgcatttaagcctaaggggtattttagtgacgcctggaacacgtttgactccctcatcgtaatcggcagcattatagacgtggccctcagcgaagcagacccaactgaaagtgaaaatgtccctgtcccaactgctacacctgggaactctgaagagagcaatagaatctccatcacctttttccgtcttttccgagtgatgcgattggtgaagcttctcagcaggggggaaggcatccggacattgctgtggacttttattaagtcctttcaggcgctcccgtatgtggccctcctcatagccatgctgttcttcatctatgcggtcattggcatgcagatgtttgggaaagttgccatgagagataacaaccagatcaataggaacaataacttccagacgtttccccaggcggtgctgctgctcttcaggtgtgcaacaggtgaggcctggcaggagatcatgctggcctgtctcccagggaagctctgtgaccctgagtcagattacaaccccggggaggagtatacatgtgggagcaactttgccattgtctatttcatcagtttttacatgctctgtgcatttctgatcatcaatctgtttgtggctgtcatcatggataatttcgactatctgacccgggactggtctattttggggcctcaccatttagatgaattcaaaagaatatggtcagaatatgaccctgaggcaaagggaaggataaaacaccttgatgtggtcactctgcttcgacgcatccagcctcccctggggtttgggaagttatgtccacacagggtagcgtgcaagagattagttgccatgaacatgcctctcaacagtgacgggacagtcatgtttaatgcaaccctgtttgctttggttcgaacggctcttaagatcaagaccgaagggaacctggagcaagctaatgaagaacttcgggctgtgataaagaaaatttggaagaaaaccagcatgaaattacttgaccaagttgtccctccagctggtgatgatgaggtaaccgtggggaagttctatgccactttcctgatacaggactactttaggaaattcaagaaacggaaagaacaaggactggtgggaaagtaccctgcgaagaacaccacaattgccctacaggcgggattaaggacactgcatgacattgggccagaaatccggcgtgctatatcgtgtgatttgcaagatgacgagcctgaggaaacaaaacgagaagaagaagatgatgtgttcaaaagaaatggtgccctgcttggaaaccatgtcaatcatgttaatagtgataggagagattcccttcagcagaccaataccacccaccgtcccctgcatgtccaaaggccttcaattccacctgcaagtgatactgagaaaccgctgtttcctccagcaggaaattcggtgtgtcataaccatcataaccataattccataggaaagcaagttcccacctcaacaaatgccaatctcaataatgccaatatgtccaaagctgcccatggaaagcggcccagcattgggaaccttgagcatgtgtctgaaaatgggcatcattcttcccacaagcatgaccgggagcctcagagaaggtccagtgtgaaaagaacccgctattatgaaacttacattaggtccgactcaggagatgaacagctcccaactatttgccgggaagacccagagatacatggctatttcagggacccccactgcttgggggagcaggagtatttcagtagtgaggaatgctacgaggatgacagctcgcccacctggagcaggcaaaactatggctactacagcagatacccaggcagaaacatcgactctgagaggccccgaggctaccatcatccccaaggattcttggaggacgatgactcgcccgtttgctatgattcacggagatctccaaggagacgcctactacctcccaccccagcatcccaccggagatcctccttcaactttgagtgcctgcgccggcagagcagccaggaagaggtcccgtcgtctcccatcttcccccatcgcacggccctgcctctgcatctaatgcagcaacagatcatggcagttgccggcctagattcaagtaaagcccagaagtactcaccgagtcactcgacccggtcgtgggccacccctccagcaacccctccctaccgggactggacaccgtgctacacccccctgatccaagtggagcagtcagaggccctggaccaggtgaacggcagcctgccgtccctgcaccgcagctcctggtacacagacgagcccgacatctcctaccggactttcacaccagccagcctgactgtccccagcagcttccggaacaaaaacagcgacaagcagaggagtgcggacagcttggtggaggcagtcctgatatccgaaggcttgggacgctatgcaagggacccaaaatttgtgtcagcaacaaaacacgaaatcgctgatgcctgtgacctcaccatcgacgagatggagagtgcagccagcaccctgcttaatgggaacgtgcgtccccgagccaacggggatgtgggccccctctcacaccggcaggactatgagctacaggactttggtcctggctacagcgacgaagagccagaccctgggagggatgaggaggacctggcggatgaaatgatatgcatcaccaccttgtagcccccagcgaggggcagactggctctggcctcaggtggggcgcaggagagccaggggaaaagtgcctcatagttaggaaagtttaggcactagttgggagtaatattcaattaattagacttttgtataagagatgtcatgcctcaagaaagccataaacctggtaggaacaggtcccaagcggttgagcctggcagagtaccatgcgctcggccccagctgcaggaaacagcaggccccgccctctcacagaggatgggtgaggaggccagacctgccctgccccattgtccagatgggcactgctgtggagtctgcttctcccatgtaccagggcaccaggcccacccaactgaaggcatggcggcggggtgcaggggaaagttaaaggtgatgacgatcatcacacctgtgtcgttacctcagccatcggtctagcatatcagtcactgggcccaacatatccatttttaaaccctttcccccaaatacactgcgtcctggttcctgtttagctgttctgaaatacggtgtgtaagtaagtcagaacccagctaccagtgattattgcgagggcaatgggacctcataaataaggttttctgtgatgtgacgccagtttacataagagaatatcactccgatggtcggtttctgactgtcacgctaagggcaactgtaaactggaataataatgcactcgcaaccaggtaaacttagatacactagtttgtttaaaattatagatttactgtacatgacttgtaatatactataatttgtatttgtaaag

SEQ ID NO: 710 - DNA, 9559 bp, Homo sapiens
gggcgagcgcctccgtccccggatgtgagctccggctgcccgcggtcccgagccagcggcggcgcgggcggcggcggcgggcaccgggcaccgcggcgggcgggcagacgggcgggcatggggggagcgccgagcggccccggcggccgggccggcatcaccgcggcgtctctccgctagaggaggggacaagccagttctcctttgcagcaaaaaattacatgtatatattattaagataatatatacattggattttatttttttaaaaagtttattttgctccatttttgaaaaagagagagcttgggtggcgagcggttttttttttaaatcaattatccttattttctgttatttgtccccgtccctccccacccccctgctgaagcgagaataagggcagggaccgcggctcctacctcttggtgatccccttccccattccgcccccgcctcaacgcccagcacagtgccctgcacacagtagtcgctcaataaatgttcgtggatgatgatgatgatgatgatgaaaaaaatgcagcatcaacggcagcagcaagcggaccacgcgaacgaggcaaactatgcaagaggcaccagacttcctctttctggtgaaggaccaacttctcagccgaatagctccaagcaaactgtcctgtcttggcaagctgcaatcgatgctgctagacaggccaaggctgcccaaactatgagcacctctgcacccccacctgtaggatctctctcccaaagaaaacgtcagcaatacgccaagagcaaaaaacagggtaactcgtccaacagccgacctgcccgcgcccttttctgtttatcactcaataaccccatccgaagagcctgcattagtatagtggaatggaaaccatttgacatatttatattattggctatttttgccaattgtgtggccttagctatttacatcccattccctgaagatgattctaattcaacaaatcataacttggaaaaagtagaatatgccttcctgattatttttacagtcgagacatttttgaagattatagcgtatggattattgctacatcctaatgcttatgttaggaatggatggaatttactggattttgttatagtaatagtaggattgtttagtgtaattttggaacaattaaccaaagaaacagaaggcgggaaccactcaagcggcaaatctggaggctttgatgtcaaagccctccgtgcctttcgagtgttgcgaccacttcgactagtgtcaggagtgcccagtttacaagttgtcctgaactccattataaaagccatggttcccctccttcacatagcccttttggtattatttgtaatcataatctatgctattataggattggaactttttattggaaaaatgcacaaaacatgtttttttgctgactcagatatcgtagctgaagaggacccagctccatgtgcgttctcagggaatggacgccagtgtactgccaatggcacggaatgtaggagtggctgggttggcccgaacggaggcatcaccaactttgataactttgcctttgccatgcttactgtgtttcagtgcatcaccatggagggctggacagacgtgctctactgggtaaatgatgcgataggatgggaatggccatgggtgtattttgttagtctgatcatccttggctcatttttcgtccttaacctggttcttggtgtccttagtggagaattctcaaaggaaagagagaaggcaaaagcacggggagatttccagaagctccgggagaagcagcagctggaggaggatctaaagggctacttggattggatcacccaagctgaggacatcgatccggagaatgaggaagaaggaggagaggaaggcaaacgaaatactagcatgcccaccagcgagactgagtctgtgaacacagagaacgtcagcggtgaaggcgagaaccgaggctgctgtggaagtctctggtgctggtggagacggagaggcgcggccaaggcggggccctctgggtgtcggcggtggggtcaagccatctcaaaatccaaactcagccgacgctggcgtcgctggaaccgattcaatcgcagaagatgtagggccgccgtgaagtctgtcacgttttactggctggttatcgtcctggtgtttctgaacaccttaaccatttcctctgagcactacaatcagccagattggttgacacagattcaagatattgccaacaaagtcctcttggctctgttcacctgcgagatgctggtaaaaatgtacagcttgggcctccaagcatatttcgtctctcttttcaaccggtttgattgcttcgtggtgtgtggtggaatcactgagacgatcttggtggaactggaaatcatgtctcccctggggatctctgtgtttcggtgtgtgcgcctcttaagaatcttcaaagtgaccaggcactggacttccctgagcaacttagtggcatccttattaaactccatgaagtccatcgcttcgctgttgcttctgctttttctcttcattatcatcttttccttgcttgggatgcagctgtttggcggcaagtttaattttgatgaaacgcaaaccaagcggagcacctttgacaatttccctcaagcacttctcacagtgttccagatcctgacaggcgaagactggaatgctgtgatgtacgatggcatcatggcttacgggggcccatcctcttcaggaatgatcgtctgcatctacttcatcatcctcttcatttgtggtaactatattctactgaatgtcttcttggccatcgctgtagacaatttggctgatgctgaaagtctgaacactgctcagaaagaagaagcggaagaaaaggagaggaaaaagattgccagaaaagagagcctagaaaataaaaagaacaacaaaccagaagtcaaccagatagccaacagtgacaacaaggttacaattgatgactatagagaagaggatgaagacaaggacccctatccgccttgcgatgtgccagtaggggaagaggaagaggaagaggaggaggatgaacctgaggttcctgccggaccccgtcctcgaaggatctcggagttgaacatgaaggaaaaaattgcccccatccctgaagggagcgctttcttcattcttagcaagaccaacccgatccgcgtaggctgccacaagctcatcaaccaccacatcttcaccaacctcatccttgtcttcatcatgctgagcagcgctgccctggccgcagaggaccccatccgcagccactccttccggaacacgatactgggttactttgactatgccttcacagccatctttactgttgagatcctgttgaagatgacaacttttggagctttcctccacaaaggggccttctgcaggaactacttcaatttgctggatatgctggtggttggggtgtctctggtgtcatttgggattcaatccagtgccatctccgttgtgaagattctgagggtcttaagggtcctgcgtcccctcagggccatcaacagagcaaaaggacttaagcacgtggtccagtgcgtcttcgtggccatccggaccatcggcaacatcatgatcgtcaccaccctcctgcagttcatgtttgcctgtatcggggtccagttgttcaaggggaagttctatcgctgtacggatgaagccaaaagtaaccctgaagaatgcaggggacttttcatcctctacaaggatggggatgttgacagtcctgtggtccgtgaacggatctggcaaaacagtgatttcaacttcgacaacgtcctctctgctatgatggcgctcttcacagtctccacgtttgagggctggcctgcgttgctgtataaagccatcgactcgaatggagagaacatcggcccaatctacaaccaccgcgtggagatctccatcttcttcatcatctacatcatcattgtagctttcttcatgatgaacatctttgtgggctttgtcatcgttacatttcaggaacaaggagaaaaagagtataagaactgtgagctggacaaaaatcagcgtcagtgtgttgaatacgccttgaaagcacgtcccttgcggagatacatccccaaaaacccctaccagtacaagttctggtacgtggtgaactcttcgcctttcgaatacatgatgtttgtcctcatcatgctcaacacactctgcttggccatgcagcactacgagcagtccaagatgttcaatgatgccatggacattctgaacatggtcttcaccggggtgttcaccgtcgagatggttttgaaagtcatcgcatttaagcctaaggggtattttagtgacgcctggaacacgtttgactccctcatcgtaatcggcagcattatagacgtggccctcagcgaagcagacccaactgaaagtgaaaatgtccctgtcccaactgctacacctgggaactctgaagagagcaatagaatctccatcacctttttccgtcttttccgagtgatgcgattggtgaagcttctcagcaggggggaaggcatccggacattgctgtggacttttattaagtcctttcaggcgctcccgtatgtggccctcctcatagccatgctgttcttcatctatgcggtcattggcatgcagatgtttgggaaagttgccatgagagataacaaccagatcaataggaacaataacttccagacgtttccccaggcggtgctgctgctcttcaggtgtgcaacaggtgaggcctggcaggagatcatgctggcctgtctcccagggaagctctgtgaccctgagtcagattacaaccccggggaggagtatacatgtgggagcaactttgccattgtctatttcatcagtttttacatgctctgtgcatttctgatcatcaatctgtttgtggctgtcatcatggataatttcgactatctgacccgggactggtctattttggggcctcaccatttagatgaattcaaaagaatatggtcagaatatgaccctgaggcaaagggaaggataaaacaccttgatgtggtcactctgcttcgacgcatccagcctcccctggggtttgggaagttatgtccacacagggtagcgtgcaagagattagttgccatgaacatgcctctcaacagtgacgggacagtcatgtttaatgcaaccctgtttgctttggttcgaacggctcttaagatcaagaccgaagggaacctggagcaagctaatgaagaacttcgggctgtgataaagaaaatttggaagaaaaccagcatgaaattacttgaccaagttgtccctccagctggtgatgatgaggtaaccgtggggaagttctatgccactttcctgatacaggactactttaggaaattcaagaaacggaaagaacaaggactggtgggaaagtaccctgcgaagaacaccacaattgccctacaggcgggattaaggacactgcatgacattgggccagaaatccggcgtgctatatcgtgtgatttgcaagatgacgagcctgaggaaacaaaacgagaagaagaagatgatgtgttcaaaagaaatggtgccctgcttggaaaccatgtcaatcatgttaatagtgataggagagattcccttcagcagaccaataccacccaccgtcccctgcatgtccaaaggccttcaattccacctgcaagtgatactgagaaaccgctgtttcctccagcaggaaattcggtgtgtcataaccatcataaccataattccataggaaagcaagttcccacctcaacaaatgccaatctcaataatgccaatatgtccaaagctgcccatggaaagcggcccagcattgggaaccttgagcatgtgtctgaaaatgggcatcattcttcccacaagcatgaccgggagcctcagagaaggtccagtgtgaaaagaacccgctattatgaaacttacattaggtccgactcaggagatgaacagctcccaactatttgccgggaagacccagagatacatggctatttcagggacccccactgcttgggggagcaggagtatttcagtagtgaggaatgctacgaggatgacagctcgcccacctggagcaggtgagctgctctggctcctgtggagagcgggaggccgccctgccctggtgctcggcccactccggaagccagggccaccggcagctgcacttgggcttcccctaaaaagcaaaatgggagcagaaactccaggccagagggagagtggagctggagaaagagagccgcagagaggcagggcaaaactatggctactacagcagatacccaggcagaaacatcgactctgagaggccccgaggctaccatcatccccaaggattcttggaggacgatgactcgcccgtttgctatgattcacggagatctccaaggagacgcctactacctcccaccccagcatcccaccggagatcctccttcaactttgagtgcctgcgccggcagagcagccaggaagaggtcccgtcgtctcccatcttcccccatcgcacggccctgcctctgcatctaatgcagcaacagatcatggcagttgccggcctagattcaagtaaagcccagaagtactcaccgagtcactcgacccggtcgtgggccacccctccagcaacccctccctaccgggactggacaccgtgctacacccccctgatccaagtggagcagtcagaggccctggaccaggtgaacggcagcctgccgtccctgcaccgcagctcctggtacacagacgagcccgacatctcctaccggactttcacaccagccagcctgactgtccccagcagcttccggaacaaaaacagcgacaagcagaggagtgcggacagcttggtggaggcagtcctgatatccgaaggcttgggacgctatgcaagggacccaaaatttgtgtcagcaacaaaacacgaaatcgctgatgcctgtgacctcaccatcgacgagatggagagtgcagccagcaccctgcttaatgggaacgtgcgtccccgagccaacggggatgtgggccccctctcacaccggcaggactatgagctacaggactttggtcctggctacagcgacgaagagccagaccctgggagggatgaggaggacctggcggatgaaatgatatgcatcaccaccttgtagcccccagcgaggggcagactggctctggcctcaggtggggcgcaggagagccaggggaaaagtgcctcatagttaggaaagtttaggcactagttgggagtaatattcaattaattagacttttgtataagagatgtcatgcctcaagaaagccataaacctggtaggaacaggtcccaagcggttgagcctggcagagtaccatgcgctcggccccagctgcaggaaacagcaggccccgccctctcacagaggatgggtgaggaggccagacctgccctgccccattgtccagatgggcactgctgtggagtctgcttctcccatgtaccagggcaccaggcccacccaactgaaggcatggcggcggggtgcaggggaaagttaaaggtgatgacgatcatcacacctgtgtcgttacctcagccatcggtctagcatatcagtcactgggcccaacatatccatttttaaaccctttcccccaaatacactgcgtcctggttcctgtttagctgttctgaaatacggtgtgtaagtaagtcagaacccagctaccagtgattattgcgagggcaatgggacctcataaataaggttttctgtgatgtgacgccagtttacataagagaatatcactccgatggtcggtttctgactgtcacgctaagggcaactgtaaactggaataataatgcactcgcaaccaggtaaacttagatacactagtttgtttaaaattatagatttactgtacatgacttgtaatatactataatttgtatttgtaaagagatggtctatattttgtaattactgtattgtatttgaactgcagcaatatccatgggtcctaataattgtagttccccactaaaatctagaaattattagtatttttactcgggctatccagaagtagaagaaatagagccaattctcatttattcagcgaaaatcctctggggttaaaattttaagtttgaaagaacttgacactacagaaatttttctaaaatattttgagtcactataaacctatcatctttccacaagatataccagatgactatttgcagtcttttctttgggcaagagttccatgattttgatactgtacctttggatccaccatgggttgcaactgtctttggttttgtttgtttgacttgaaccaccctctggtaagtaagtgaattacagagcaggtccagctggctgctctgccccttgggtatccatagttacggttttctctgtggcccacccagggtgttttttgcatcgctggtgcagaaatgcataggtggatgagatatagctgctcttgtcctctggggactggtggtgctgcttaagaaataaggggtgctggggacagaggagcaacgtggtgatctataggattggagtgtcggggtctgtacaaatcgtattgttgccttttacaaaactgctgtactgtatgttctctttgagggcttttgtatgcaattgaatgagggctgaagaagttttcattagaatgcactcacactctgactgtacgtcctgatgaaaacccacttttggataattagaaccgtcaaggcttcattttctgtcaacagaattaggccgactgtcaagttaccttggcagggattccctgcaatcaaaaagatagatgataggtagcaattttggtccaaaatttttaatagtatacagacaacctgttaattttttttttttttttttttgtaaataacaaacaccactttgttatgaagaccttacaaacctcttcttaagacattcttactctgatccaggcaaaaacacttcaaggtttgtaaatgactctttcctgacataaatccttttttattaaaatgcaaaatgttcttcagaataaaactgtgtaataatttttatacttgggagtgctccttgcacagagctgtcatttgccagtgagagcctccgacggggcaggtactgtgccagggcagctctgaaattatggatattcttatcctcctggttccttcggtgccaatggtaacctaataccagccgcagggagcgccatttctcctaaagggctacaccactgtcaacattatcctggactctgtgtctctctctgttgggtcttgtggcatcacatcaggccaaaattgccagaccaggaccctaagtgtctgatagaggcgatgatcttttccaaagtcagtacttacaaactggcattcttacaggctgcaccatttcctagtatgtctgctttaagcctggttcaacctctcatcgaatattaaatttttctttgtaagaaaaa

SEQ ID NO: 711 - DNA, 9353 bp, Homo sapiens
gggcgagcgcctccgtccccggatgtgagctccggctgcccgcggtcccgagccagcggcggcgcgggcggcggcggcgggcaccgggcaccgcggcgggcgggcagacgggcgggcatggggggagcgccgagcggccccggcggccgggccggcatcaccgcggcgtctctccgctagaggaggggacaagccagttctcctttgcagcaaaaaattacatgtatatattattaagataatatatacattggattttatttttttaaaaagtttattttgctccatttttgaaaaagagagagcttgggtggcgagcggttttttttttaaatcaattatccttattttctgttatttgtccccgtccctccccacccccctgctgaagcgagaataagggcagggaccgcggctcctacctcttggtgatccccttccccattccgcccccgcctcaacgcccagcacagtgccctgcacacagtagtcgctcaataaatgttcgtggatgatgatgatgatgatgatgaaaaaaatgcagcatcaacggcagcagcaagcggaccacgcgaacgaggcaaactatgcaagaggcaccagacttcctctttctggtgaaggaccaacttctcagccgaatagctccaagcaaactgtcctgtcttggcaagctgcaatcgatgctgctagacaggccaaggctgcccaaactatgagcacctctgcacccccacctgtaggatctctctcccaaagaaaacgtcagcaatacgccaagagcaaaaaacagggtaactcgtccaacagccgacctgcccgcgcccttttctgtttatcactcaataaccccatccgaagagcctgcattagtatagtggaatggaaaccatttgacatatttatattattggctatttttgccaattgtgtggccttagctatttacatcccattccctgaagatgattctaattcaacaaatcataacttggaaaaagtagaatatgccttcctgattatttttacagtcgagacatttttgaagattatagcgtatggattattgctacatcctaatgcttatgttaggaatggatggaatttactggattttgttatagtaatagtaggattgtttagtgtaattttggaacaattaaccaaagaaacagaaggcgggaaccactcaagcggcaaatctggaggctttgatgtcaaagccctccgtgcctttcgagtgttgcgaccacttcgactagtgtcaggagtgcccagtttacaagttgtcctgaactccattataaaagccatggttcccctccttcacatagcccttttggtattatttgtaatcataatctatgctattataggattggaactttttattggaaaaatgcacaaaacatgtttttttgctgactcagatatcgtagctgaagaggacccagctccatgtgcgttctcagggaatggacgccagtgtactgccaatggcacggaatgtaggagtggctgggttggcccgaacggaggcatcaccaactttgataactttgcctttgccatgcttactgtgtttcagtgcatcaccatggagggctggacagacgtgctctactgggtaaatgatgcgataggatgggaatggccatgggtgtattttgttagtctgatcatccttggctcatttttcgtccttaacctggttcttggtgtccttagtggagaattctcaaaggaaagagagaaggcaaaagcacggggagatttccagaagctccgggagaagcagcagctggaggaggatctaaagggctacttggattggatcacccaagctgaggacatcgatccggagaatgaggaagaaggaggagaggaaggcaaacgaaatactagcatgcccaccagcgagactgagtctgtgaacacagagaacgtcagcggtgaaggcgagaaccgaggctgctgtggaagtctctggtgctggtggagacggagaggcgcggccaaggcggggccctctgggtgtcggcggtggggtcaagccatctcaaaatccaaactcagccgacgctggcgtcgctggaaccgattcaatcgcagaagatgtagggccgccgtgaagtctgtcacgttttactggctggttatcgtcctggtgtttctgaacaccttaaccatttcctctgagcactacaatcagccagattggttgacacagattcaagatattgccaacaaagtcctcttggctctgttcacctgcgagatgctggtaaaaatgtacagcttgggcctccaagcatatttcgtctctcttttcaaccggtttgattgcttcgtggtgtgtggtggaatcactgagacgatcttggtggaactggaaatcatgtctcccctggggatctctgtgtttcggtgtgtgcgcctcttaagaatcttcaaagtgaccaggcactggacttccctgagcaacttagtggcatccttattaaactccatgaagtccatcgcttcgctgttgcttctgctttttctcttcattatcatcttttccttgcttgggatgcagctgtttggcggcaagtttaattttgatgaaacgcaaaccaagcggagcacctttgacaatttccctcaagcacttctcacagtgttccagatcctgacaggcgaagactggaatgctgtgatgtacgatggcatcatggcttacgggggcccatcctcttcaggaatgatcgtctgcatctacttcatcatcctcttcatttgtggtaactatattctactgaatgtcttcttggccatcgctgtagacaatttggctgatgctgaaagtctgaacactgctcagaaagaagaagcggaagaaaaggagaggaaaaagattgccagaaaagagagcctagaaaataaaaagaacaacaaaccagaagtcaaccagatagccaacagtgacaacaaggttacaattgatgactatagagaagaggatgaagacaaggacccctatccgccttgcgatgtgccagtaggggaagaggaagaggaagaggaggaggatgaacctgaggttcctgccggaccccgtcctcgaaggatctcggagttgaacatgaaggaaaaaattgcccccatccctgaagggagcgctttcttcattcttagcaagaccaacccgatccgcgtaggctgccacaagctcatcaaccaccacatcttcaccaacctcatccttgtcttcatcatgctgagcagcgctgccctggccgcagaggaccccatccgcagccactccttccggaacacgatactgggttactttgactatgccttcacagccatctttactgttgagatcctgttgaagatgacaacttttggagctttcctccacaaaggggccttctgcaggaactacttcaatttgctggatatgctggtggttggggtgtctctggtgtcatttgggattcaatccagtgccatctccgttgtgaagattctgagggtcttaagggtcctgcgtcccctcagggccatcaacagagcaaaaggacttaagcacgtggtccagtgcgtcttcgtggccatccggaccatcggcaacatcatgatcgtcaccaccctcctgcagttcatgtttgcctgtatcggggtccagttgttcaaggggaagttctatcgctgtacggatgaagccaaaagtaaccctgaagaatgcaggggacttttcatcctctacaaggatggggatgttgacagtcctgtggtccgtgaacggatctggcaaaacagtgatttcaacttcgacaacgtcctctctgctatgatggcgctcttcacagtctccacgtttgagggctggcctgcgttgctgtataaagccatcgactcgaatggagagaacatcggcccaatctacaaccaccgcgtggagatctccatcttcttcatcatctacatcatcattgtagctttcttcatgatgaacatctttgtgggctttgtcatcgttacatttcaggaacaaggagaaaaagagtataagaactgtgagctggacaaaaatcagcgtcagtgtgttgaatacgccttgaaagcacgtcccttgcggagatacatccccaaaaacccctaccagtacaagttctggtacgtggtgaactcttcgcctttcgaatacatgatgtttgtcctcatcatgctcaacacactctgcttggccatgcagcactacgagcagtccaagatgttcaatgatgccatggacattctgaacatggtcttcaccggggtgttcaccgtcgagatggttttgaaagtcatcgcatttaagcctaaggggtattttagtgacgcctggaacacgtttgactccctcatcgtaatcggcagcattatagacgtggccctcagcgaagcagacccaactgaaagtgaaaatgtccctgtcccaactgctacacctgggaactctgaagagagcaatagaatctccatcacctttttccgtcttttccgagtgatgcgattggtgaagcttctcagcaggggggaaggcatccggacattgctgtggacttttattaagtcctttcaggcgctcccgtatgtggccctcctcatagccatgctgttcttcatctatgcggtcattggcatgcagatgtttgggaaagttgccatgagagataacaaccagatcaataggaacaataacttccagacgtttccccaggcggtgctgctgctcttcaggtgtgcaacaggtgaggcctggcaggagatcatgctggcctgtctcccagggaagctctgtgaccctgagtcagattacaaccccggggaggagtatacatgtgggagcaactttgccattgtctatttcatcagtttttacatgctctgtgcatttctgatcatcaatctgtttgtggctgtcatcatggataatttcgactatctgacccgggactggtctattttggggcctcaccatttagatgaattcaaaagaatatggtcagaatatgaccctgaggcaaagggaaggataaaacaccttgatgtggtcactctgcttcgacgcatccagcctcccctggggtttgggaagttatgtccacacagggtagcgtgcaagagattagttgccatgaacatgcctctcaacagtgacgggacagtcatgtttaatgcaaccctgtttgctttggttcgaacggctcttaagatcaagaccgaagggaacctggagcaagctaatgaagaacttcgggctgtgataaagaaaatttggaagaaaaccagcatgaaattacttgaccaagttgtccctccagctggtgatgatgaggtaaccgtggggaagttctatgccactttcctgatacaggactactttaggaaattcaagaaacggaaagaacaaggactggtgggaaagtaccctgcgaagaacaccacaattgccctacaggcgggattaaggacactgcatgacattgggccagaaatccggcgtgctatatcgtgtgatttgcaagatgacgagcctgaggaaacaaaacgagaagaagaagatgatgtgttcaaaagaaatggtgccctgcttggaaaccatgtcaatcatgttaatagtgataggagagattcccttcagcagaccaataccacccaccgtcccctgcatgtccaaaggccttcaattccacctgcaagtgatactgagaaaccgctgtttcctccagcaggaaattcggtgtgtcataaccatcataaccataattccataggaaagcaagttcccacctcaacaaatgccaatctcaataatgccaatatgtccaaagctgcccatggaaagcggcccagcattgggaaccttgagcatgtgtctgaaaatgggcatcattcttcccacaagcatgaccgggagcctcagagaaggtccagtgtgaaaaggtccgactcaggagatgaacagctcccaactatttgccgggaagacccagagatacatggctatttcagggacccccactgcttgggggagcaggagtatttcagtagtgaggaatgctacgaggatgacagctcgcccacctggagcaggcaaaactatggctactacagcagatacccaggcagaaacatcgactctgagaggccccgaggctaccatcatccccaaggattcttggaggacgatgactcgcccgtttgctatgattcacggagatctccaaggagacgcctactacctcccaccccagcatcccaccggagatcctccttcaactttgagtgcctgcgccggcagagcagccaggaagaggtcccgtcgtctcccatcttcccccatcgcacggccctgcctctgcatctaatgcagcaacagatcatggcagttgccggcctagattcaagtaaagcccagaagtactcaccgagtcactcgacccggtcgtgggccacccctccagcaacccctccctaccgggactggacaccgtgctacacccccctgatccaagtggagcagtcagaggccctggaccaggtgaacggcagcctgccgtccctgcaccgcagctcctggtacacagacgagcccgacatctcctaccggactttcacaccagccagcctgactgtccccagcagcttccggaacaaaaacagcgacaagcagaggagtgcggacagcttggtggaggcagtcctgatatccgaaggcttgggacgctatgcaagggacccaaaatttgtgtcagcaacaaaacacgaaatcgctgatgcctgtgacctcaccatcgacgagatggagagtgcagccagcaccctgcttaatgggaacgtgcgtccccgagccaacggggatgtgggccccctctcacaccggcaggactatgagctacaggactttggtcctggctacagcgacgaagagccagaccctgggagggatgaggaggacctggcggatgaaatgatatgcatcaccaccttgtagcccccagcgaggggcagactggctctggcctcaggtggggcgcaggagagccaggggaaaagtgcctcatagttaggaaagtttaggcactagttgggagtaatattcaattaattagacttttgtataagagatgtcatgcctcaagaaagccataaacctggtaggaacaggtcccaagcggttgagcctggcagagtaccatgcgctcggccccagctgcaggaaacagcaggccccgccctctcacagaggatgggtgaggaggccagacctgccctgccccattgtccagatgggcactgctgtggagtctgcttctcccatgtaccagggcaccaggcccacccaactgaaggcatggcggcggggtgcaggggaaagttaaaggtgatgacgatcatcacacctgtgtcgttacctcagccatcggtctagcatatcagtcactgggcccaacatatccatttttaaaccctttcccccaaatacactgcgtcctggttcctgtttagctgttctgaaatacggtgtgtaagtaagtcagaacccagctaccagtgattattgcgagggcaatgggacctcataaataaggttttctgtgatgtgacgccagtttacataagagaatatcactccgatggtcggtttctgactgtcacgctaagggcaactgtaaactggaataataatgcactcgcaaccaggtaaacttagatacactagtttgtttaaaattatagatttactgtacatgacttgtaatatactataatttgtatttgtaaagagatggtctatattttgtaattactgtattgtatttgaactgcagcaatatccatgggtcctaataattgtagttccccactaaaatctagaaattattagtatttttactcgggctatccagaagtagaagaaatagagccaattctcatttattcagcgaaaatcctctggggttaaaattttaagtttgaaagaacttgacactacagaaatttttctaaaatattttgagtcactataaacctatcatctttccacaagatataccagatgactatttgcagtcttttctttgggcaagagttccatgattttgatactgtacctttggatccaccatgggttgcaactgtctttggttttgtttgtttgacttgaaccaccctctggtaagtaagtgaattacagagcaggtccagctggctgctctgccccttgggtatccatagttacggttttctctgtggcccacccagggtgttttttgcatcgctggtgcagaaatgcataggtggatgagatatagctgctcttgtcctctggggactggtggtgctgcttaagaaataaggggtgctggggacagaggagcaacgtggtgatctataggattggagtgtcggggtctgtacaaatcgtattgttgccttttacaaaactgctgtactgtatgttctctttgagggcttttgtatgcaattgaatgagggctgaagaagttttcattagaatgcactcacactctgactgtacgtcctgatgaaaacccacttttggataattagaaccgtcaaggcttcattttctgtcaacagaattaggccgactgtcaagttaccttggcagggattccctgcaatcaaaaagatagatgataggtagcaattttggtccaaaatttttaatagtatacagacaacctgttaattttttttttttttttttttgtaaataacaaacaccactttgttatgaagaccttacaaacctcttcttaagacattcttactctgatccaggcaaaaacacttcaaggtttgtaaatgactctttcctgacataaatccttttttattaaaatgcaaaatgttcttcagaataaaactgtgtaataatttttatacttgggagtgctccttgcacagagctgtcatttgccagtgagagcctccgacggggcaggtactgtgccagggcagctctgaaattatggatattcttatcctcctggttccttcggtgccaatggtaacctaataccagccgcagggagcgccatttctcctaaagggctacaccactgtcaacattatcctggactctgtgtctctctctgttgggtcttgtggcatcacatcaggccaaaattgccagaccaggaccctaagtgtctgatagaggcgatgatcttttccaaagtcagtacttacaaactggcattcttacaggctgcaccatttcctagtatgtctgctttaagcctggttcaacctctcatcgaatattaaatttttctttgtaagaaaaa

SEQ ID NO: 712 - DNA, 9320 bp, Homo sapiens
gggcgagcgcctccgtccccggatgtgagctccggctgcccgcggtcccgagccagcggcggcgcgggcggcggcggcgggcaccgggcaccgcggcgggcgggcagacgggcgggcatggggggagcgccgagcggccccggcggccgggccggcatcaccgcggcgtctctccgctagaggaggggacaagccagttctcctttgcagcaaaaaattacatgtatatattattaagataatatatacattggattttatttttttaaaaagtttattttgctccatttttgaaaaagagagagcttgggtggcgagcggttttttttttaaatcaattatccttattttctgttatttgtccccgtccctccccacccccctgctgaagcgagaataagggcagggaccgcggctcctacctcttggtgatccccttccccattccgcccccgcctcaacgcccagcacagtgccctgcacacagtagtcgctcaataaatgttcgtggatgatgatgatgatgatgatgaaaaaaatgcagcatcaacggcagcagcaagcggaccacgcgaacgaggcaaactatgcaagaggcaccagacttcctctttctggtgaaggaccaacttctcagccgaatagctccaagcaaactgtcctgtcttggcaagctgcaatcgatgctgctagacaggccaaggctgcccaaactatgagcacctctgcacccccacctgtaggatctctctcccaaagaaaacgtcagcaatacgccaagagcaaaaaacagggtaactcgtccaacagccgacctgcccgcgcccttttctgtttatcactcaataaccccatccgaagagcctgcattagtatagtggaatggaaaccatttgacatatttatattattggctatttttgccaattgtgtggccttagctatttacatcccattccctgaagatgattctaattcaacaaatcataacttggaaaaagtagaatatgccttcctgattatttttacagtcgagacatttttgaagattatagcgtatggattattgctacatcctaatgcttatgttaggaatggatggaatttactggattttgttatagtaatagtaggattgtttagtgtaattttggaacaattaaccaaagaaacagaaggcgggaaccactcaagcggcaaatctggaggctttgatgtcaaagccctccgtgcctttcgagtgttgcgaccacttcgactagtgtcaggagtgcccagtttacaagttgtcctgaactccattataaaagccatggttcccctccttcacatagcccttttggtattatttgtaatcataatctatgctattataggattggaactttttattggaaaaatgcacaaaacatgtttttttgctgactcagatatcgtagctgaagaggacccagctccatgtgcgttctcagggaatggacgccagtgtactgccaatggcacggaatgtaggagtggctgggttggcccgaacggaggcatcaccaactttgataactttgcctttgccatgcttactgtgtttcagtgcatcaccatggagggctggacagacgtgctctactggatgaatgatgctatgggatttgaattgccctgggtgtattttgtcagtctcgtcatctttgggtcatttttcgtactaaatcttgtacttggtgtattgagcggagaattctcaaaggaaagagagaaggcaaaagcacggggagatttccagaagctccgggagaagcagcagctggaggaggatctaaagggctacttggattggatcacccaagctgaggacatcgatccggagaatgaggaagaaggaggagaggaaggcaaacgaaatactagcatgcccaccagcgagactgagtctgtgaacacagagaacgtcagcggtgaaggcgagaaccgaggctgctgtggaagtctctgtcaagccatctcaaaatccaaactcagccgacgctggcgtcgctggaaccgattcaatcgcagaagatgtagggccgccgtgaagtctgtcacgttttactggctggttatcgtcctggtgtttctgaacaccttaaccatttcctctgagcactacaatcagccagattggttgacacagattcaagatattgccaacaaagtcctcttggctctgttcacctgcgagatgctggtaaaaatgtacagcttgggcctccaagcatatttcgtctctcttttcaaccggtttgattgcttcgtggtgtgtggtggaatcactgagacgatcttggtggaactggaaatcatgtctcccctggggatctctgtgtttcggtgtgtgcgcctcttaagaatcttcaaagtgaccaggcactggacttccctgagcaacttagtggcatccttattaaactccatgaagtccatcgcttcgctgttgcttctgctttttctcttcattatcatcttttccttgcttgggatgcagctgtttggcggcaagtttaattttgatgaaacgcaaaccaagcggagcacctttgacaatttccctcaagcacttctcacagtgttccagatcctgacaggcgaagactggaatgctgtgatgtacgatggcatcatggcttacgggggcccatcctcttcaggaatgatcgtctgcatctacttcatcatcctcttcatttgtggtaactatattctactgaatgtcttcttggccatcgctgtagacaatttggctgatgctgaaagtctgaacactgctcagaaagaagaagcggaagaaaaggagaggaaaaagattgccagaaaagagagcctagaaaataaaaagaacaacaaaccagaagtcaaccagatagccaacagtgacaacaaggttacaattgatgactatagagaagaggatgaagacaaggacccctatccgccttgcgatgtgccagtaggggaagaggaagaggaagaggaggaggatgaacctgaggttcctgccggaccccgtcctcgaaggatctcggagttgaacatgaaggaaaaaattgcccccatccctgaagggagcgctttcttcattcttagcaagaccaacccgatccgcgtaggctgccacaagctcatcaaccaccacatcttcaccaacctcatccttgtcttcatcatgctgagcagcgctgccctggccgcagaggaccccatccgcagccactccttccggaacacgatactgggttactttgactatgccttcacagccatctttactgttgagatcctgttgaagatgacaacttttggagctttcctccacaaaggggccttctgcaggaactacttcaatttgctggatatgctggtggttggggtgtctctggtgtcatttgggattcaatccagtgccatctccgttgtgaagattctgagggtcttaagggtcctgcgtcccctcagggccatcaacagagcaaaaggacttaagcacgtggtccagtgcgtcttcgtggccatccggaccatcggcaacatcatgatcgtcaccaccctcctgcagttcatgtttgcctgtatcggggtccagttgttcaaggggaagttctatcgctgtacggatgaagccaaaagtaaccctgaagaatgcaggggacttttcatcctctacaaggatggggatgttgacagtcctgtggtccgtgaacggatctggcaaaacagtgatttcaacttcgacaacgtcctctctgctatgatggcgctcttcacagtctccacgtttgagggctggcctgcgttgctgtataaagccatcgactcgaatggagagaacatcggcccaatctacaaccaccgcgtggagatctccatcttcttcatcatctacatcatcattgtagctttcttcatgatgaacatctttgtgggctttgtcatcgttacatttcaggaacaaggagaaaaagagtataagaactgtgagctggacaaaaatcagcgtcagtgtgttgaatacgccttgaaagcacgtcccttgcggagatacatccccaaaaacccctaccagtacaagttctggtacgtggtgaactcttcgcctttcgaatacatgatgtttgtcctcatcatgctcaacacactctgcttggccatgcagcactacgagcagtccaagatgttcaatgatgccatggacattctgaacatggtcttcaccggggtgttcaccgtcgagatggttttgaaagtcatcgcatttaagcctaaggggtattttagtgacgcctggaacacgtttgactccctcatcgtaatcggcagcattatagacgtggccctcagcgaagcagacccaactgaaagtgaaaatgtccctgtcccaactgctacacctgggaactctgaagagagcaatagaatctccatcacctttttccgtcttttccgagtgatgcgattggtgaagcttctcagcaggggggaaggcatccggacattgctgtggacttttattaagtcctttcaggcgctcccgtatgtggccctcctcatagccatgctgttcttcatctatgcggtcattggcatgcagatgtttgggaaagttgccatgagagataacaaccagatcaataggaacaataacttccagacgtttccccaggcggtgctgctgctcttcaggtgtgcaacaggtgaggcctggcaggagatcatgctggcctgtctcccagggaagctctgtgaccctgagtcagattacaaccccggggaggagtatacatgtgggagcaactttgccattgtctatttcatcagtttttacatgctctgtgcatttctgatcatcaatctgtttgtggctgtcatcatggataatttcgactatctgacccgggactggtctattttggggcctcaccatttagatgaattcaaaagaatatggtcagaatatgaccctgaggcaaagggaaggataaaacaccttgatgtggtcactctgcttcgacgcatccagcctcccctggggtttgggaagttatgtccacacagggtagcgtgcaagagattagttgccatgaacatgcctctcaacagtgacgggacagtcatgtttaatgcaaccctgtttgctttggttcgaacggctcttaagatcaagaccgaagggaacctggagcaagctaatgaagaacttcgggctgtgataaagaaaatttggaagaaaaccagcatgaaattacttgaccaagttgtccctccagctggtgatgatgaggtaaccgtggggaagttctatgccactttcctgatacaggactactttaggaaattcaagaaacggaaagaacaaggactggtgggaaagtaccctgcgaagaacaccacaattgccctacaggcgggattaaggacactgcatgacattgggccagaaatccggcgtgctatatcgtgtgatttgcaagatgacgagcctgaggaaacaaaacgagaagaagaagatgatgtgttcaaaagaaatggtgccctgcttggaaaccatgtcaatcatgttaatagtgataggagagattcccttcagcagaccaataccacccaccgtcccctgcatgtccaaaggccttcaattccacctgcaagtgatactgagaaaccgctgtttcctccagcaggaaattcggtgtgtcataaccatcataaccataattccataggaaagcaagttcccacctcaacaaatgccaatctcaataatgccaatatgtccaaagctgcccatggaaagcggcccagcattgggaaccttgagcatgtgtctgaaaatgggcatcattcttcccacaagcatgaccgggagcctcagagaaggtccagtgtgaaaagaacccgctattatgaaacttacattaggtccgactcaggagatgaacagctcccaactatttgccgggaagacccagagatacatggctatttcagggacccccactgcttgggggagcaggagtatttcagtagtgaggaatgctacgaggatgacagctcgcccacctggagcaggcaaaactatggctactacagcagatacccaggcagaaacatcgactctgagaggccccgaggctaccatcatccccaaggattcttggaggacgatgactcgcccgtttgctatgattcacggagatctccaaggagacgcctactacctcccaccccagcatcccaccggagatcctccttcaactttgagtgcctgcgccggcagagcagccaggaagaggtcccgtcgtctcccatcttcccccatcgcacggccctgcctctgcatctaatgcagcaacagatcatggcagttgccggcctagattcaagtaaagcccagaagtactcaccgagtcactcgacccggtcgtgggccacccctccagcaacccctccctaccgggactggacaccgtgctacacccccctgatccaagtggagcagtcagaggccctggaccaggtgaacggcagcctgccgtccctgcaccgcagctcctggtacacagacgagcccgacatctcctaccggactttcacaccagccagcctgactgtccccagcagcttccggaacaaaaacagcgacaagcagaggagtgcggacagcttggtggaggcagtcctgatatccgaaggcttgggacgctatgcaagggacccaaaatttgtgtcagcaacaaaacacgaaatcgctgatgcctgtgacctcaccatcgacgagatggagagtgcagccagcaccctgcttaatgggaacgtgcgtccccgagccaacggggatgtgggccccctctcacaccggcaggactatgagctacaggactttggtcctggctacagcgacgaagagccagaccctgggagggatgaggaggacctggcggatgaaatgatatgcatcaccaccttgtagcccccagcgaggggcagactggctctggcctcaggtggggcgcaggagagccaggggaaaagtgcctcatagttaggaaagtttaggcactagttgggagtaatattcaattaattagacttttgtataagagatgtcatgcctcaagaaagccataaacctggtaggaacaggtcccaagcggttgagcctggcagagtaccatgcgctcggccccagctgcaggaaacagcaggccccgccctctcacagaggatgggtgaggaggccagacctgccctgccccattgtccagatgggcactgctgtggagtctgcttctcccatgtaccagggcaccaggcccacccaactgaaggcatggcggcggggtgcaggggaaagttaaaggtgatgacgatcatcacacctgtgtcgttacctcagccatcggtctagcatatcagtcactgggcccaacatatccatttttaaaccctttcccccaaatacactgcgtcctggttcctgtttagctgttctgaaatacggtgtgtaagtaagtcagaacccagctaccagtgattattgcgagggcaatgggacctcataaataaggttttctgtgatgtgacgccagtttacataagagaatatcactccgatggtcggtttctgactgtcacgctaagggcaactgtaaactggaataataatgcactcgcaaccaggtaaacttagatacactagtttgtttaaaattatagatttactgtacatgacttgtaatatactataatttgtatttgtaaagagatggtctatattttgtaattactgtattgtatttgaactgcagcaatatccatgggtcctaataattgtagttccccactaaaatctagaaattattagtatttttactcgggctatccagaagtagaagaaatagagccaattctcatttattcagcgaaaatcctctggggttaaaattttaagtttgaaagaacttgacactacagaaatttttctaaaatattttgagtcactataaacctatcatctttccacaagatataccagatgactatttgcagtcttttctttgggcaagagttccatgattttgatactgtacctttggatccaccatgggttgcaactgtctttggttttgtttgtttgacttgaaccaccctctggtaagtaagtgaattacagagcaggtccagctggctgctctgccccttgggtatccatagttacggttttctctgtggcccacccagggtgttttttgcatcgctggtgcagaaatgcataggtggatgagatatagctgctcttgtcctctggggactggtggtgctgcttaagaaataaggggtgctggggacagaggagcaacgtggtgatctataggattggagtgtcggggtctgtacaaatcgtattgttgccttttacaaaactgctgtactgtatgttctctttgagggcttttgtatgcaattgaatgagggctgaagaagttttcattagaatgcactcacactctgactgtacgtcctgatgaaaacccacttttggataattagaaccgtcaaggcttcattttctgtcaacagaattaggccgactgtcaagttaccttggcagggattccctgcaatcaaaaagatagatgataggtagcaattttggtccaaaatttttaatagtatacagacaacctgttaattttttttttttttttttttgtaaataacaaacaccactttgttatgaagaccttacaaacctcttcttaagacattcttactctgatccaggcaaaaacacttcaaggtttgtaaatgactctttcctgacataaatccttttttattaaaatgcaaaatgttcttcagaataaaactgtgtaataatttttatacttgggagtgctccttgcacagagctgtcatttgccagtgagagcctccgacggggcaggtactgtgccagggcagctctgaaattatggatattcttatcctcctggttccttcggtgccaatggtaacctaataccagccgcagggagcgccatttctcctaaagggctacaccactgtcaacattatcctggactctgtgtctctctctgttgggtcttgtggcatcacatcaggccaaaattgccagaccaggaccctaagtgtctgatagaggcgatgatcttttccaaagtcagtacttacaaactggcattcttacaggctgcaccatttcctagtatgtctgctttaagcctggttcaacctctcatcgaatattaaatttttctttgtaagaaaaa

SEQ ID NO: 713 - DNA, 7713 bp, Homo sapiens
gtggctcaggatgcaggtccccaaggatgtcctgatatgtgcttgtcctctttgcctccttcagagaattctcaaaggaaagagagaaggcaaaagcacggggagatttccagaagctccgggagaagcagcagctggaggaggatctaaagggctacttggattggatcacccaagctgaggacatcgatccggagaatgaggaagaaggaggagaggaaggcaaacgaaatactagcatgcccaccagcgagactgagtctgtgaacacagagaacgtcagcggtgaaggcgagaaccgaggctgctgtggaagtctctggtgctggtggagacggagaggcgcggccaaggcggggccctctgggtgtcggcggtggggtcaagccatctcaaaatccaaactcagccgacgctggcgtcgctggaaccgattcaatcgcagaagatgtagggccgccgtgaagtctgtcacgttttactggctggttatcgtcctggtgtttctgaacaccttaaccatttcctctgagcactacaatcagccagattggttgacacagattcaagatattgccaacaaagtcctcttggctctgttcacctgcgagatgctggtaaaaatgtacagcttgggcctccaagcatatttcgtctctcttttcaaccggtttgattgcttcgtggtgtgtggtggaatcactgagacgatcttggtggaactggaaatcatgtctcccctggggatctctgtgtttcggtgtgtgcgcctcttaagaatcttcaaagtgaccaggcactggacttccctgagcaacttagtggcatccttattaaactccatgaagtccatcgcttcgctgttgcttctgctttttctcttcattatcatcttttccttgcttgggatgcagctgtttggcggcaagtttaattttgatgaaacgcaaaccaagcggagcacctttgacaatttccctcaagcacttctcacagtgttccagatcctgacaggcgaagactggaatgctgtgatgtacgatggcatcatggcttacgggggcccatcctcttcaggaatgatcgtctgcatctacttcatcatcctcttcatttgtggtaactatattctactgaatgtcttcttggccatcgctgtagacaatttggctgatgctgaaagtctgaacactgctcagaaagaagaagcggaagaaaaggagaggaaaaagattgccagaaaagagagcctagaaaataaaaagaacaacaaaccagaagtcaaccagatagccaacagtgacaacaaggttacaattgatgactatagagaagaggatgaagacaaggacccctatccgccttgcgatgtgccagtaggggaagaggaagaggaagaggaggaggatgaacctgaggttcctgccggaccccgtcctcgaaggatctcggagttgaacatgaaggaaaaaattgcccccatccctgaagggagcgctttcttcattcttagcaagaccaacccgatccgcgtaggctgccacaagctcatcaaccaccacatcttcaccaacctcatccttgtcttcatcatgctgagcagcgctgccctggccgcagaggaccccatccgcagccactccttccggaacacgatactgggttactttgactatgccttcacagccatctttactgttgagatcctgttgaagatgacaacttttggagctttcctccacaaaggggccttctgcaggaactacttcaatttgctggatatgctggtggttggggtgtctctggtgtcatttgggattcaatccagtgccatctccgttgtgaagattctgagggtcttaagggtcctgcgtcccctcagggccatcaacagagcaaaaggacttaagcacgtggtccagtgcgtcttcgtggccatccggaccatcggcaacatcatgatcgtcaccaccctcctgcagttcatgtttgcctgtatcggggtccagttgttcaaggggaagttctatcgctgtacggatgaagccaaaagtaaccctgaagaatgcaggggacttttcatcctctacaaggatggggatgttgacagtcctgtggtccgtgaacggatctggcaaaacagtgatttcaacttcgacaacgtcctctctgctatgatggcgctcttcacagtctccacgtttgagggctggcctgcgttgctgtataaagccatcgactcgaatggagagaacatcggcccaatctacaaccaccgcgtggagatctccatcttcttcatcatctacatcatcattgtagctttcttcatgatgaacatctttgtgggctttgtcatcgttacatttcaggaacaaggagaaaaagagtataagaactgtgagctggacaaaaatcagcgtcagtgtgttgaatacgccttgaaagcacgtcccttgcggagatacatccccaaaaacccctaccagtacaagttctggtacgtggtgaactcttcgcctttcgaatacatgatgtttgtcctcatcatgctcaacacactctgcttggccatgcagcactacgagcagtccaagatgttcaatgatgccatggacattctgaacatggtcttcaccggggtgttcaccgtcgagatggttttgaaagtcatcgcatttaagcctaaggggtattttagtgacgcctggaacacgtttgactccctcatcgtaatcggcagcattatagacgtggccctcagcgaagcagacccaactgaaagtgaaaatgtccctgtcccaactgctacacctgggaactctgaagagagcaatagaatctccatcacctttttccgtcttttccgagtgatgcgattggtgaagcttctcagcaggggggaaggcatccggacattgctgtggacttttattaagtcctttcaggcgctcccgtatgtggccctcctcatagccatgctgttcttcatctatgcggtcattggcatgcagatgtttgggaaagttgccatgagagataacaaccagatcaataggaacaataacttccagacgtttccccaggcggtgctgctgctcttcaggtgtgcaacaggtgaggcctggcaggagatcatgctggcctgtctcccagggaagctctgtgaccctgagtcagattacaaccccggggaggagtatacatgtgggagcaactttgccattgtctatttcatcagtttttacatgctctgtgcatttctgatcatcaatctgtttgtggctgtcatcatggataatttcgactatctgacccgggactggtctattttggggcctcaccatttagatgaattcaaaagaatatggtcagaatatgaccctgaggcaaagggaaggataaaacaccttgatgtggtcactctgcttcgacgcatccagcctcccctggggtttgggaagttatgtccacacagggtagcgtgcaagagattagttgccatgaacatgcctctcaacagtgacgggacagtcatgtttaatgcaaccctgtttgctttggttcgaacggctcttaagatcaagaccgaagggaacctggagcaagctaatgaagaacttcgggctgtgataaagaaaatttggaagaaaaccagcatgaaattacttgaccaagttgtccctccagctggtgatgatgaggtaaccgtggggaagttctatgccactttcctgatacaggactactttaggaaattcaagaaacggaaagaacaaggactggtgggaaagtaccctgcgaagaacaccacaattgccctacaggcgggattaaggacactgcatgacattgggccagaaatccggcgtgctatatcgtgtgatttgcaagatgacgagcctgaggaaacaaaacgagaagaagaagatgatgtgttcaaaagaaatggtgccctgcttggaaaccatgtcaatcatgttaatagtgataggagagattcccttcagcagaccaataccacccaccgtcccctgcatgtccaaaggccttcaattccacctgcaagtgatactgagaaaccgctgtttcctccagcaggaaattcggtgtgtcataaccatcataaccataattccataggaaagcaagttcccacctcaacaaatgccaatctcaataatgccaatatgtccaaagctgcccatggaaagcggcccagcattgggaaccttgagcatgtgtctgaaaatgggcatcattcttcccacaagcatgaccgggagcctcagagaaggtccagtgtgaaaagaacccgctattatgaaacttacattaggtccgactcaggagatgaacagctcccaactatttgccgggaagacccagagatacatggctatttcagggacccccactgcttgggggagcaggagtatttcagtagtgaggaatgctacgaggatgacagctcgcccacctggagcaggcaaaactatggctactacagcagatacccaggcagaaacatcgactctgagaggccccgaggctaccatcatccccaaggattcttggaggacgatgactcgcccgtttgctatgattcacggagatctccaaggagacgcctactacctcccaccccagcatcccaccggagatcctccttcaactttgagtgcctgcgccggcagagcagccaggaagaggtcccgtcgtctcccatcttcccccatcgcacggccctgcctctgcatctaatgcagcaacagatcatggcagttgccggcctagattcaagtaaagcccagaagtactcaccgagtcactcgacccggtcgtgggccacccctccagcaacccctccctaccgggactggacaccgtgctacacccccctgatccaagtggagcagtcagaggccctggaccaggtgaacggcagcctgccgtccctgcaccgcagctcctggtacacagacgagcccgacatctcctaccggactttcacaccagccagcctgactgtccccagcagcttccggaacaaaaacagcgacaagcagaggagtgcggacagcttggtggaggcagtcctgatatccgaaggcttgggacgctatgcaagggacccaaaatttgtgtcagcaacaaaacacgaaatcgctgatgcctgtgacctcaccatcgacgagatggagagtgcagccagcaccctgcttaatgggaacgtgcgtccccgagccaacggggatgtgggccccctctcacaccggcaggactatgagctacaggactttggtcctggctacagcgacgaagagccagaccctgggagggatgaggaggacctggcggatgaaatgatatgcatcaccaccttgtagcccccagcgaggggcagactggctctggcctcaggtggggcgcaggagagccaggggaaaagtgcctcatagttaggaaagtttaggcactagttgggagtaatattcaattaattagacttttgtataagagatgtcatgcctcaagaaagccataaacctggtaggaacaggtcccaagcggttgagcctggcagagtaccatgcgctcggccccagctgcaggaaacagcaggccccgccctctcacagaggatgggtgaggaggccagacctgccctgccccattgtccagatgggcactgctgtggagtctgcttctcccatgtaccagggcaccaggcccacccaactgaaggcatggcggcggggtgcaggggaaagttaaaggtgatgacgatcatcacacctgtgtcgttacctcagccatcggtctagcatatcagtcactgggcccaacatatccatttttaaaccctttcccccaaatacactgcgtcctggttcctgtttagctgttctgaaatacggtgtgtaagtaagtcagaacccagctaccagtgattattgcgagggcaatgggacctcataaataaggttttctgtgatgtgacgccagtttacataagagaatatcactccgatggtcggtttctgactgtcacgctaagggcaactgtaaactggaataataatgcactcgcaaccaggtaaacttagatacactagtttgtttaaaattatagatttactgtacatgacttgtaatatactataatttgtatttgtaaagagatggtctatattttgtaattactgtattgtatttgaactgcagcaatatccatgggtcctaataattgtagttccccactaaaatctagaaattattagtatttttactcgggctatccagaagtagaagaaatagagccaattctcatttattcagcgaaaatcctctggggttaaaattttaagtttgaaagaacttgacactacagaaatttttctaaaatattttgagtcactataaacctatcatctttccacaagatataccagatgactatttgcagtcttttctttgggcaagagttccatgattttgatactgtacctttggatccaccatgggttgcaactgtctttggttttgtttgtttgacttgaaccaccctctggtaagtaagtgaattacagagcaggtccagctggctgctctgccccttgggtatccatagttacggttttctctgtggcccacccagggtgttttttgcatcgctggtgcagaaatgcataggtggatgagatatagctgctcttgtcctctggggactggtggtgctgcttaagaaataaggggtgctggggacagaggagcaacgtggtgatctataggattggagtgtcggggtctgtacaaatcgtattgttgccttttacaaaactgctgtactgtatgttctctttgagggcttttgtatgcaattgaatgagggctgaagaagttttcattagaatgcactcacactctgactgtacgtcctgatgaaaacccacttttggataattagaaccgtcaaggcttcattttctgtcaacagaattaggccgactgtcaagttaccttggcagggattccctgcaatcaaaaagatagatgataggtagcaattttggtccaaaatttttaatagtatacagacaacctgttaattttttttttttttttttttgtaaataacaaacaccactttgttatgaagaccttacaaacctcttcttaagacattcttactctgatccaggcaaaaacacttcaaggtttgtaaatgactctttcctgacataaatccttttttattaaaatgcaaaatgttcttcagaataaaactgtgtaataatttttatacttgggagtgctccttgcacagagctgtcatttgccagtgagagcctccgacggggcaggtactgtgccagggcagctctgaaattatggatattcttatcctcctggttccttcggtgccaatggtaacctaataccagccgcagggagcgccatttctcctaaagggctacaccactgtcaacattatcctggactctgtgtctctctctgttgggtcttgtggcatcacatcaggccaaaattgccagaccaggaccctaagtgtctgatagaggcgatgatcttttccaaagtcagtacttacaaactggcattcttacaggctgcaccatttcctagtatgtctgctttaagcctggttcaacctctcatcgaatattaaatttttctttgtaagaaaaa

SEQ ID NO: 714 - DNA, 6365 bp, Homo sapiens
gggcgagcgcctccgtccccggatgtgagctccggctgcccgcggtcccgagccagcggcggcgcgggcggcggcggcgggcaccgggcaccgcggcgggcgggcagacgggcgggcatggggggagcgccgagcggccccggcggccgggccggcatcaccgcggcgtctctccgctagaggaggggacaagccagttctcctttgcagcaaaaaattacatgtatatattattaagataatatatacattggattttatttttttaaaaagtttattttgctccatttttgaaaaagagagagcttgggtggcgagcggttttttttttaaatcaattatccttattttctgttatttgtccccgtccctccccacccccctgctgaagcgagaataagggcagggaccgcggctcctacctcttggtgatccccttccccattccgcccccgcctcaacgcccagcacagtgccctgcacacagtagtcgctcaataaatgttcgtggatgatgatgatgatgatgatgaaaaaaatgcagcatcaacggcagcagcaagcggaccacgcgaacgaggcaaactatgcaagaggcaccagacttcctctttctggtgaaggaccaacttctcagccgaatagctccaagcaaactgtcctgtcttggcaagctgcaatcgatgctgctagacaggccaaggctgcccaaactatgagcacctctgcacccccacctgtaggatctctctcccaaagaaaacgtcagcaatacgccaagagcaaaaaacagggtaactcgtccaacagccgacctgcccgcgcccttttctgtttatcactcaataaccccatccgaagagcctgcattagtatagtggaatggaaaccatttgacatatttatattattggctatttttgccaattgtgtggccttagctatttacatcccattccctgaagatgattctaattcaacaaatcataacttggaaaaagtagaatatgccttcctgattatttttacagtcgagacatttttgaagattatagcgtatggattattgctacatcctaatgcttatgttaggaatggatggaatttactggattttgttatagtaatagtaggattgtttagtgtaattttggaacaattaaccaaagaaacagaaggcgggaaccactcaagcggcaaatctggaggctttgatgtcaaagccctccgtgcctttcgagtgttgcgaccacttcgactagtgtcaggagtgcccagtttacaagttgtcctgaactccattataaaagccatggttcccctccttcacatagcccttttggtattatttgtaatcataatctatgctattataggattggaactttttattggaaaaatgcacaaaacatgtttttttgctgactcagatatcgtagctgaagaggacccagctccatgtgcgttctcagggaatggacgccagtgtactgccaatggcacggaatgtaggagtggctgggttggcccgaacggaggcatcaccaactttgataactttgcctttgccatgcttactgtgtttcagtgcatcaccatggagggctggacagacgtgctctactgggtaaatgatgcgataggatgggaatggccatgggtgtattttgttagtctgatcatccttggctcatttttcgtccttaacctggttcttggtgtccttagtggagaattctcaaaggaaagagagaaggcaaaagcacggggagatttccagaagctccgggagaagcagcagctggaggaggatctaaagggctacttggattggatcacccaagctgaggacatcgatccggagaatgaggaagaaggaggagaggaaggcaaacgaaatactagcatgcccaccagcgagactgagtctgtgaacacagagaacgtcagcggtgaaggcgagaaccgaggctgctgtggaagtctctggtgctggtggagacggagaggcgcggccaaggcggggccctctgggtgtcggcggtggggtcaagccatctcaaaatccaaactcagccgacgctggcgtcgctggaaccgattcaatcgcagaagatgtagggccgccgtgaagtctgtcacgttttactggctggttatcgtcctggtgtttctgaacaccttaaccatttcctctgagcactacaatcagccagattggttgacacagattcaagatattgccaacaaagtcctcttggctctgttcacctgcgagatgctggtaaaaatgtacagcttgggcctccaagcatatttcgtctctcttttcaaccggtttgattgcttcgtggtgtgtggtggaatcactgagacgatcttggtggaactggaaatcatgtctcccctggggatctctgtgtttcggtgtgtgcgcctcttaagaatcttcaaagtgaccaggcactggacttccctgagcaacttagtggcatccttattaaactccatgaagtccatcgcttcgctgttgcttctgctttttctcttcattatcatcttttccttgcttgggatgcagctgtttggcggcaagtttaattttgatgaaacgcaaaccaagcggagcacctttgacaatttccctcaagcacttctcacagtgttccagatcctgacaggcgaagactggaatgctgtgatgtacgatggcatcatggcttacgggggcccatcctcttcaggaatgatcgtctgcatctacttcatcatcctcttcatttgtggtaactatattctactgaatgtcttcttggccatcgctgtagacaatttggctgatgctgaaagtctgaacactgctcagaaagaagaagcggaagaaaaggagaggaaaaagattgccagaaaagagagcctagaaaataaaaagaacaacaaaccagaagtcaaccagatagccaacagtgacaacaaggttacaattgatgactatagagaagaggatgaagacaaggacccctatccgccttgcgatgtgccagtaggggaagaggaagaggaagaggaggaggatgaacctgaggttcctgccggaccccgtcctcgaaggatctcggagttgaacatgaaggaaaaaattgcccccatccctgaagggagcgctttcttcattcttagcaagaccaacccgatccgcgtaggctgccacaagctcatcaaccaccacatcttcaccaacctcatccttgtcttcatcatgctgagcagcgctgccctggccgcagaggaccccatccgcagccactccttccggaacacgatactgggttactttgactatgccttcacagccatctttactgttgagatcctgttgaagatgacaacttttggagctttcctccacaaaggggccttctgcaggaactacttcaatttgctggatatgctggtggttggggtgtctctggtgtcatttgggattcaatccagtgccatctccgttgtgaagattctgagggtcttaagggtcctgcgtcccctcagggccatcaacagagcaaaaggacttaagcacgtggtccagtgcgtcttcgtggccatccggaccatcggcaacatcatgatcgtcaccaccctcctgcagttcatgtttgcctgtatcggggtccagttgttcaaggggaagttctatcgctgtacggatgaagccaaaagtaaccctgaagaatgcaggggacttttcatcctctacaaggatggggatgttgacagtcctgtggtccgtgaacggatctggcaaaacagtgatttcaacttcgacaacgtcctctctgctatgatggcgctcttcacagtctccacgtttgagggctggcctgcgttgctgtataaagccatcgactcgaatggagagaacatcggcccaatctacaaccaccgcgtggagatctccatcttcttcatcatctacatcatcattgtagctttcttcatgatgaacatctttgtgggctttgtcatcgttacatttcaggaacaaggagaaaaagagtataagaactgtgagctggacaaaaatcagcgtcagtgtgttgaatacgccttgaaagcacgtcccttgcggagatacatccccaaaaacccctaccagtacaagttctggtacgtggtgaactcttcgcctttcgaatacatgatgtttgtcctcatcatgctcaacacactctgcttggccatgcagcactacgagcagtccaagatgttcaatgatgccatggacattctgaacatggtcttcaccggggtgttcaccgtcgagatggttttgaaagtcatcgcatttaagcctaaggggtattttagtgacgcctggaacacgtttgactccctcatcgtaatcggcagcattatagacgtggccctcagcgaagcagacccaactgaaagtgaaaatgtccctgtcccaactgctacacctgggaactctgaagagagcaatagaatctccatcacctttttccgtcttttccgagtgatgcgattggtgaagcttctcagcaggggggaaggcatccggacattgctgtggacttttattaagtcctttcaggcgctcccgtatgtggccctcctcatagccatgctgttcttcatctatgcggtcattggcatgcagatgtttgggaaagttgccatgagagataacaaccagatcaataggaacaataacttccagacgtttccccaggcggtgctgctgctcttcaggtgtgcaacaggtgaggcctggcaggagatcatgctggcctgtctcccagggaagctctgtgaccctgagtcagattacaaccccggggaggagtatacatgtgggagcaactttgccattgtctatttcatcagtttttacatgctctgtgcatttctgatcatcaatctgtttgtggctgtcatcatggataatttcgactatctgacccgggactggtctattttggggcctcaccatttagatgaattcaaaagaatatggtcagaatatgaccctgaggcaaagggaaggataaaacaccttgatgtggtcactctgcttcgacgcatccagcctcccctggggtttgggaagttatgtccacacagggtagcgtgcaagagattagttgccatgaacatgcctctcaacagtgacgggacagtcatgtttaatgcaaccctgtttgctttggttcgaacggctcttaagatcaagaccgaagggaacctggagcaagctaatgaagaacttcgggctgtgataaagaaaatttggaagaaaaccagcatgaaattacttgaccaagttgtccctccagctggtgatgatgaggtaaccgtggggaagttctatgccactttcctgatacaggactactttaggaaattcaagaaacggaaagaacaaggactggtgggaaagtaccctgcgaagaacaccacaattgccctacaggcgggattaaggacactgcatgacattgggccagaaatccggcgtgctatatcgtgtgatttgcaagatgacgagcctgaggaaacaaaacgagaagaagaagatgatgtgttcaaaagaaatggtgccctgcttggaaaccatgtcaatcatgttaatagtgataggagagattcccttcagcagaccaataccacccaccgtcccctgcatgtccaaaggccttcaattccacctgcaagtgatactgagaaaccgctgtttcctccagcaggaaattcggtgtgtcataaccatcataaccataattccataggaaagcaagttcccacctcaacaaatgccaatctcaataatgccaatatgtccaaagctgcccatggaaagcggcccagcattgggaaccttgagcatgtgtctgaaaatgggcatcattcttcccacaagcatgaccgggagcctcagagaaggtccagtgtgaaaaggtccgactcaggagatgaacagctcccaactatttgccgggaagacccagagatacatggctatttcagggacccccactgcttgggggagcaggagtatttcagtagtgaggaatgctacgaggatgacagctcgcccacctggagcaggcaaaactatggctactacagcagatacccaggcagaaacatcgactctgagaggccccgaggctaccatcatccccaaggattcttggaggacgatgactcgcccgtttgctatgattcacggagatctccaaggagacgcctactacctcccaccccagcatgtgaggccagattttttgttttgggtggaacctcccggggaacagtgtacctctcccccaacccccgctctg

SEQ ID NO: 715 - DNA, 5440 bp, Homo sapiens
gggcgagcgcctccgtccccggatgtgagctccggctgcccgcggtcccgagccagcggcggcgcgggcggcggcggcgggcaccgggcaccgcggcgggcgggcagacgggcgggcatggggggagcgccgagcggccccggcggccgggccggcatcaccgcggcgtctctccgctagaggaggggacaagccagttctcctttgcagcaaaaaattacatgtatatattattaagataatatatacattggattttatttttttaaaaagtttattttgctccatttttgaaaaagagagagcttgggtggcgagcggttttttttttaaatcaattatccttattttctgttatttgtccccgtccctccccacccccctgctgaagcgagaataagggcagggaccgcggctcctacctcttggtgatccccttccccattccgcccccgcctcaacgcccagcacagtgccctgcacacagtagtcgctcaataaatgttcgtggatgatgatgatgatgatgatgaaaaaaatgcagcatcaacggcagcagcaagcggaccacgcgaacgaggcaaactatgcaagaggcaccagacttcctctttctggtgaaggaccaacttctcagccgaatagctccaagcaaactgtcctgtcttggcaagctgcaatcgatgctgctagacaggccaaggctgcccaaactatgagcacctctgcacccccacctgtaggatctctctcccaaagaaaacgtcagcaatacgccaagagcaaaaaacagggtaactcgtccaacagccgacctgcccgcgcccttttctgtttatcactcaataaccccatccgaagagcctgcattagtatagtggaatggaaaccatttgacatatttatattattggctatttttgccaattgtgtggccttagctatttacatcccattccctgaagatgattctaattcaacaaatcataacttggaaaaagtagaatatgccttcctgattatttttacagtcgagacatttttgaagattatagcgtatggattattgctacatcctaatgcttatgttaggaatggatggaatttactggattttgttatagtaatagtaggattgtttagtgtaattttggaacaattaaccaaagaaacagaaggcgggaaccactcaagcggcaaatctggaggctttgatgtcaaagccctccgtgcctttcgagtgttgcgaccacttcgactagtgtcaggagtgcccagtttacaagttgtcctgaactccattataaaagccatggttcccctccttcacatagcccttttggtattatttgtaatcataatctatgctattataggattggaactttttattggaaaaatgcacaaaacatgtttttttgctgactcagatatcgtagctgaagaggacccagctccatgtgcgttctcagggaatggacgccagtgtactgccaatggcacggaatgtaggagtggctgggttggcccgaacggaggcatcaccaactttgataactttgcctttgccatgcttactgtgtttcagtgcatcaccatggagggctggacagacgtgctctactgggtaaatgatgcgataggatgggaatggccatgggtgtattttgttagtctgatcatccttggctcatttttcgtccttaacctggttcttggtgtccttagtggagaattctcaaaggaaagagagaaggcaaaagcacggggagatttccagaagctccgggagaagcagcagctggaggaggatctaaagggctacttggattggatcacccaagctgaggacatcgatccggagaatgaggaagaaggaggagaggaaggcaaacgaaatactagcatgcccaccagcgagactgagtctgtgaacacagagaacgtcagcggtgaaggcgagaaccgaggctgctgtggaagtctctggtgctggtggagacggagaggcgcggccaaggcggggccctctgggtgtcggcggtggggtcaagccatctcaaaatccaaactcagccgacgctggcgtcgctggaaccgattcaatcgcagaagatgtagggccgccgtgaagtctgtcacgttttactggctggttatcgtcctggtgtttctgaacaccttaaccatttcctctgagcactacaatcagccagattggttgacacagattcaagatattgccaacaaagtcctcttggctctgttcacctgcgagatgctggtaaaaatgtacagcttgggcctccaagcatatttcgtctctcttttcaaccggtttgattgcttcgtggtgtgtggtggaatcactgagacgatcttggtggaactggaaatcatgtctcccctggggatctctgtgtttcggtgtgtgcgcctcttaagaatcttcaaagtgaccaggcactggacttccctgagcaacttagtggcatccttattaaactccatgaagtccatcgcttcgctgttgcttctgctttttctcttcattatcatcttttccttgcttgggatgcagctgtttggcggcaagtttaattttgatgaaacgcaaaccaagcggagcacctttgacaatttccctcaagcacttctcacagtgttccagatcctgacaggcgaagactggaatgctgtgatgtacgatggcatcatggcttacgggggcccatcctcttcaggaatgatcgtctgcatctacttcatcatcctcttcatttgtggtaactatattctactgaatgtcttcttggccatcgctgtagacaatttggctgatgctgaaagtctgaacactgctcagaaagaagaagcggaagaaaaggagaggaaaaagattgccagaaaagagagcctagaaaataaaaagaacaacaaaccagaagtcaaccagatagccaacagtgacaacaaggttacaattgatgactatagagaagaggatgaagacaaggacccctatccgccttgcgatgtgccagtaggggaagaggaagaggaagaggaggaggatgaacctgaggttcctgccggaccccgtcctcgaaggatctcggagttgaacatgaaggaaaaaattgcccccatccctgaagggagcgctttcttcattcttagcaagaccaacccgatccgcgtaggctgccacaagctcatcaaccaccacatcttcaccaacctcatccttgtcttcatcatgctgagcagcgctgccctggccgcagaggaccccatccgcagccactccttccggaacacgatactgggttactttgactatgccttcacagccatctttactgttgagatcctgttgaagatgacaacttttggagctttcctccacaaaggggccttctgcaggaactacttcaatttgctggatatgctggtggttggggtgtctctggtgtcatttgggattcaatccagtgccatctccgttgtgaagattctgagggtcttaagggtcctgcgtcccctcagggccatcaacagagcaaaaggacttaagcacgtggtccagtgcgtcttcgtggccatccggaccatcggcaacatcatgatcgtcaccaccctcctgcagttcatgtttgcctgtatcggggtccagttgttcaaggggaagttctatcgctgtacggatgaagccaaaagtaaccctgaagaatgcaggggacttttcatcctctacaaggatggggatgttgacagtcctgtggtccgtgaacggatctggcaaaacagtgatttcaacttcgacaacgtcctctctgctatgatggcgctcttcacagtctccacgtttgagggctggcctgcgttgctgtataaagccatcgactcgaatggagagaacatcggcccaatctacaaccaccgcgtggagatctccatcttcttcatcatctacatcatcattgtagctttcttcatgatgaacatctttgtgggctttgtcatcgttacatttcaggaacaaggagaaaaagagtataagaactgtgagctggacaaaaatcagcgtcagtgtgttgaatacgccttgaaagcacgtcccttgcggagatacatccccaaaaacccctaccagtacaagttctggtacgtggtgaactcttcgcctttcgaatacatgatgtttgtcctcatcatgctcaacacactctgcttggccatgcagcactacgagcagtccaagatgttcaatgatgccatggacattctgaacatggtcttcaccggggtgttcaccgtcgagatggttttgaaagtcatcgcatttaagcctaaggggtattttagtgacgcctggaacacgtttgactccctcatcgtaatcggcagcattatagacgtggccctcagcgaagcagacccaactgaaagtgaaaatgtccctgtcccaactgctacacctgggaactctgaagagagcaatagaatctccatcacctttttccgtcttttccgagtgatgcgattggtgaagcttctcagcaggggggaaggcatccggacattgctgtggacttttattaagtcctttcaggcgctcccgtatgtggccctcctcatagccatgctgttcttcatctatgcggtcattggcatgcagatgtttgggaaagttgccatgagagataacaaccagatcaataggaacaataacttccagacgtttccccaggcggtgctgctgctcttcaggtgtgcaacaggtgaggcctggcaggagatcatgctggcctgtctcccagggaagctctgtgaccctgagtcagattacaaccccggggaggagtatacatgtgggagcaactttgccattgtctatttcatcagtttttacatgctctgtgcatttctgatcatcaatctgtttgtggctgtcatcatggataatttcgactatctgacccgggactggtctattttggggcctcaccatttagatgaattcaaaagaatatggtcagaatatgaccctgaggcaaagggaaggataaaacaccttgatgtggtcactctgcttcgacgcatccagcctcccctggggtttgggaagttatgtccacacagggtagcgtgcaagagattagttgccatgaacatgcctctcaacagtgacgggacagtcatgtttaatgcaaccctgtttgctttggttcgaacggctcttaagatcaagaccgaagggaacctggagcaagctaatgaagaacttcgggctgtgataaagaaaatttggaagaaaaccagcatgaaattacttgaccaagttgtccctccagctggtggtcagtgcagtctatttcctaagtagtccttggccagtgctttggttttaatgctagtgtctccagaaagtccagag

SEQ ID NO: 716 - DNA, 4400 bp, Homo sapiens
gggcgagcgcctccgtccccggatgtgagctccggctgcccgcggtcccgagccagcggcggcgcgggcggcggcggcgggcaccgggcaccgcggcgggcgggcagacgggcgggcatggggggagcgccgagcggccccggcggccgggccggcatcaccgcggcgtctctccgctagaggaggggacaagccagttctcctttgcagcaaaaaattacatgtatatattattaagataatatatacattggattttatttttttaaaaagtttattttgctccatttttgaaaaagagagagcttgggtggcgagcggttttttttttaaatcaattatccttattttctgttatttgtccccgtccctccccacccccctgctgaagcgagaataagggcagggaccgcggctcctacctcttggtgatccccttccccattccgcccccgcctcaacgcccagcacagtgccctgcacacagtagtcgctcaataaatgttcgtggatgatgatgatgatgatgatgaaaaaaatgcagcatcaacggcagcagcaagcggaccacgcgaacgaggcaaactatgcaagaggcaccagacttcctctttctggtgaaggaccaacttctcagccgaatagctccaagcaaactgtcctgtcttggcaagctgcaatcgatgctgctagacaggccaaggctgcccaaactatgagcacctctgcacccccacctgtaggatctctctcccaaagaaaacgtcagcaatacgccaagagcaaaaaacagggtaactcgtccaacagccgacctgcccgcgcccttttctgtttatcactcaataaccccatccgaagagcctgcattagtatagtggaatggaaaccatttgacatatttatattattggctatttttgccaattgtgtggccttagctatttacatcccattccctgaagatgattctaattcaacaaatcataacttggaaaaagtagaatatgccttcctgattatttttacagtcgagacatttttgaagattatagcgtatggattattgctacatcctaatgcttatgttaggaatggatggaatttactggattttgttatagtaatagtaggattgtttagtgtaattttggaacaattaaccaaagaaacagaaggcgggaaccactcaagcggcaaatctggaggctttgatgtcaaagccctccgtgcctttcgagtgttgcgaccacttcgactagtgtcaggagtgcccagtttacaagttgtcctgaactccattataaaagccatggttcccctccttcacatagcccttttggtattatttgtaatcataatctatgctattataggattggaactttttattggaaaaatgcacaaaacatgtttttttgctgactcagatatcgtagctgaagaggacccagctccatgtgcgttctcagggaatggacgccagtgtactgccaatggcacggaatgtaggagtggctgggttggcccgaacggaggcatcaccaactttgataactttgcctttgccatgcttactgtgtttcagtgcatcaccatggagggctggacagacgtgctctactgggtaaatgatgcgataggatgggaatggccatgggtgtattttgttagtctgatcatccttggctcatttttcgtccttaacctggttcttggtgtccttagtggagaattctcaaaggaaagagagaaggcaaaagcacggggagatttccagaagctccgggagaagcagcagctggaggaggatctaaagggctacttggattggatcacccaagctgaggacatcgatccggagaatgaggaagaaggaggagaggaaggcaaacgaaatactagcatgcccaccagcgagactgagtctgtgaacacagagaacgtcagcggtgaaggcgagaaccgaggctgctgtggaagtctctggtgctggtggagacggagaggcgcggccaaggcggggccctctgggtgtcggcggtggggtcaagccatctcaaaatccaaactcagccgacgctggcgtcgctggaaccgattcaatcgcagaagatgtagggccgccgtgaagtctgtcacgttttactggctggttatcgtcctggtgtttctgaacaccttaaccatttcctctgagcactacaatcagccagattggttgacacagattcaagatattgccaacaaagtcctcttggctctgttcacctgcgagatgctggtaaaaatgtacagcttgggcctccaagcatatttcgtctctcttttcaaccggtttgattgcttcgtggtgtgtggtggaatcactgagacgatcttggtggaactggaaatcatgtctcccctggggatctctgtgtttcggtgtgtgcgcctcttaagaatcttcaaagtgaccaggcactggacttccctgagcaacttagtggcatccttattaaactccatgaagtccatcgcttcgctgttgcttctgctttttctcttcattatcatcttttccttgcttgggatgcagctgtttggcggcaagtttaattttgatgaaacgcaaaccaagcggagcacctttgacaatttccctcaagcacttctcacagtgttccagatcctgacaggcgaagactggaatgctgtgatgtacgatggcatcatggcttacgggggcccatcctcttcaggaatgatcgtctgcatctacttcatcatcctcttcatttgtggtaactatattctactgaatgtcttcttggccatcgctgtagacaatttggctgatgctgaaagtctgaacactgctcagaaagaagaagcggaagaaaaggagaggaaaaagattgccagaaaagagagcctagaaaataaaaagaacaacaaaccagaagtcaaccagatagccaacagtgacaacaaggttacaattgatgactatagagaagaggatgaagacaaggacccctatccgccttgcgatgtgccagtaggggaagaggaagaggaagaggaggaggatgaacctgaggttcctgccggaccccgtcctcgaaggatctcggagttgaacatgaaggaaaaaattgcccccatccctgaagggagcgctttcttcattcttagcaagaccaacccgatccgcgtaggctgccacaagctcatcaaccaccacatcttcaccaacctcatccttgtcttcatcatgctgagcagcgctgccctggccgcagaggaccccatccgcagccactccttccggaacacgatactgggttactttgactatgccttcacagccatctttactgttgagatcctgttgaagatgacaacttttggagctttcctccacaaaggggccttctgcaggaactacttcaatttgctggatatgctggtggttggggtgtctctggtgtcatttgggattcaatccagtgccatctccgttgtgaagattctgagggtcttaagggtcctgcgtcccctcagggccatcaacagagcaaaaggacttaagcacgtggtccagtgcgtcttcgtggccatccggaccatcggcaacatcatgatcgtcaccaccctcctgcagttcatgtttgcctgtatcggggtccagttgttcaaggggaagttctatcgctgtacggatgaagccaaaagtaaccctgaagaatgcaggggacttttcatcctctacaaggatggggatgttgacagtcctgtggtccgtgaacggatctggcaaaacagtgatttcaacttcgacaacgtcctctctgctatgatggcgctcttcacagtctccacgtttgagggctggcctgcgttgctgtataaagccatcgactcgaatggagagaacatcggcccaatctacaaccaccgcgtggagatctccatcttcttcatcatctacatcatcattgtagctttcttcatgatgaacatctttgtgggctttgtcatcgttacatttcaggaacaaggagaaaaagagtataagaactgtgagctggacaaaaatcagcgtcagtgtgttgaatacgccttgaaagcacgtcccttgcggagatacatccccaaaaacccctaccagtacaagttctggtacgtggtgaactcttcgcctttcgaatacatgatgtttgtcctcatcatgctcaacacactctgcttggccatgcagcactacgagcagtccaagatgttcaatgatgccatggacattctgaacatggtcttcaccggggtgttcaccgtcgagatggttttgaaagtcatcgcatttaagcctaaggtgagttgcagaacccacttttcaaaggttgttgctgagtcac

SEQ ID NO: 717 - DNA, 3363 bp, Homo sapiens
gggcgagcgcctccgtccccggatgtgagctccggctgcccgcggtcccgagccagcggcggcgcgggcggcggcggcgggcaccgggcaccgcggcgggcgggcagacgggcgggcatggggggagcgccgagcggccccggcggccgggccggcatcaccgcggcgtctctccgctagaggaggggacaagccagttctcctttgcagcaaaaaattacatgtatatattattaagataatatatacattggattttatttttttaaaaagtttattttgctccatttttgaaaaagagagagcttgggtggcgagcggttttttttttaaatcaattatccttattttctgttatttgtccccgtccctccccacccccctgctgaagcgagaataagggcagggaccgcggctcctacctcttggtgatccccttccccattccgcccccgcctcaacgcccagcacagtgccctgcacacagtagtcgctcaataaatgttcgtggatgatgatgatgatgatgatgaaaaaaatgcagcatcaacggcagcagcaagcggaccacgcgaacgaggcaaactatgcaagaggcaccagacttcctctttctggtgaaggaccaacttctcagccgaatagctccaagcaaactgtcctgtcttggcaagctgcaatcgatgctgctagacaggccaaggctgcccaaactatgagcacctctgcacccccacctgtaggatctctctcccaaagaaaacgtcagcaatacgccaagagcaaaaaacagggtaactcgtccaacagccgacctgcccgcgcccttttctgtttatcactcaataaccccatccgaagagcctgcattagtatagtggaatggaaaccatttgacatatttatattattggctatttttgccaattgtgtggccttagctatttacatcccattccctgaagatgattctaattcaacaaatcataacttggaaaaagtagaatatgccttcctgattatttttacagtcgagacatttttgaagattatagcgtatggattattgctacatcctaatgcttatgttaggaatggatggaatttactggattttgttatagtaatagtaggattgtttagtgtaattttggaacaattaaccaaagaaacagaaggcgggaaccactcaagcggcaaatctggaggctttgatgtcaaagccctccgtgcctttcgagtgttgcgaccacttcgactagtgtcaggagtgcccagtttacaagttgtcctgaactccattataaaagccatggttcccctccttcacatagcccttttggtattatttgtaatcataatctatgctattataggattggaactttttattggaaaaatgcacaaaacatgtttttttgctgactcagatatcgtagctgaagaggacccagctccatgtgcgttctcagggaatggacgccagtgtactgccaatggcacggaatgtaggagtggctgggttggcccgaacggaggcatcaccaactttgataactttgcctttgccatgcttactgtgtttcagtgcatcaccatggagggctggacagacgtgctctactgggtaaatgatgcgataggatgggaatggccatgggtgtattttgttagtctgatcatccttggctcatttttcgtccttaacctggttcttggtgtccttagtggagaattctcaaaggaaagagagaaggcaaaagcacggggagatttccagaagctccgggagaagcagcagctggaggaggatctaaagggctacttggattggatcacccaagctgaggacatcgatccggagaatgaggaagaaggaggagaggaaggcaaacgaaatactagcatgcccaccagcgagactgagtctgtgaacacagagaacgtcagcggtgaaggcgagaaccgaggctgctgtggaagtctctggtgctggtggagacggagaggcgcggccaaggcggggccctctgggtgtcggcggtggggtcaagccatctcaaaatccaaactcagccgacgctggcgtcgctggaaccgattcaatcgcagaagatgtagggccgccgtgaagtctgtcacgttttactggctggttatcgtcctggtgtttctgaacaccttaaccatttcctctgagcactacaatcagccagattggttgacacagattcaagatattgccaacaaagtcctcttggctctgttcacctgcgagatgctggtaaaaatgtacagcttgggcctccaagcatatttcgtctctcttttcaaccggtttgattgcttcgtggtgtgtggtggaatcactgagacgatcttggtggaactggaaatcatgtctcccctggggatctctgtgtttcggtgtgtgcgcctcttaagaatcttcaaagtgaccaggcactggacttccctgagcaacttagtggcatccttattaaactccatgaagtccatcgcttcgctgttgcttctgctttttctcttcattatcatcttttccttgcttgggatgcagctgtttggcggcaagtttaattttgatgaaacgcaaaccaagcggagcacctttgacaatttccctcaagcacttctcacagtgttccagatcctgacaggcgaagactggaatgctgtgatgtacgatggcatcatggcttacgggggcccatcctcttcaggaatgatcgtctgcatctacttcatcatcctcttcatttgtggtaactatattctactgaatgtcttcttggccatcgctgtagacaatttggctgatgctgaaagtctgaacactgctcagaaagaagaagcggaagaaaaggagaggaaaaagattgccagaaaagagagcctagaaaataaaaagaacaacaaaccagaagtcaaccagatagccaacagtgacaacaaggttacaattgatgactatagagaagaggatgaagacaaggacccctatccgccttgcgatgtgccagtaggggaagaggaagaggaagaggaggaggatgaacctgaggttcctgccggaccccgtcctcgaaggatctcggagttgaacatgaaggaaaaaattgcccccatccctgaagggagcgctttcttcattcttagcaagaccaacccgatccgcgtaggctgccacaagctcatcaaccaccacatcttcaccaacctcatccttgtcttcatcatgctgagcagcgctgccctggccgcagaggaccccatccgcagccactccttccggaacacggtaagtccccagggtggggctcgctctgggatagccctggc

SEQ ID NO: 718 - DNA, 4970 bp, Homo sapiens
cgtcgttgatattgctataactgaagtgaatccaactgaaagtgaaaatgtccctgtcccaactgctacacctgggaactctgaagagagcaatagaatctccatcacctttttccgtcttttccgagtgatgcgattggtgaagcttctcagcaggggggaaggcatccggacattgctgtggacttttattaagtcctttcaggcgctcccgtatgtggccctcctcatagccatgctgttcttcatctatgcggtcattggcatgcagatgtttgggaaagttgccatgagagataacaaccagatcaataggaacaataacttccagacgtttccccaggcggtgctgctgctcttcaggtgtgcaacaggtgaggcctggcaggagatcatgctggcctgtctcccagggaagctctgtgaccctgagtcagattacaaccccggggaggagtatacatgtgggagcaactttgccattgtctatttcatcagtttttacatgctctgtgcatttctgatcatcaatctgtttgtggctgtcatcatggataatttcgactatctgacccgggactggtctattttggggcctcaccatttagatgaattcaaaagaatatggtcagaatatgaccctgaggcaaagggaaggataaaacaccttgatgtggtcactctgcttcgacgcatccagcctcccctggggtttgggaagttatgtccacacagggtagcgtgcaagagattagttgccatgaacatgcctctcaacagtgacgggacagtcatgtttaatgcaaccctgtttgctttggttcgaacggctcttaagatcaagaccgaagggaacctggagcaagctaatgaagaacttcgggctgtgataaagaaaatttggaagaaaaccagcatgaaattacttgaccaagttgtccctccagctggtgatgatgaggtaaccgtggggaagttctatgccactttcctgatacaggactactttaggaaattcaagaaacggaaagaacaaggactggtgggaaagtaccctgcgaagaacaccacaattgccctacaggcgggattaaggacactgcatgacattgggccagaaatccggcgtgctatatcgtgtgatttgcaagatgacgagcctgaggaaacaaaacgagaagaagaagatgatgtgttcaaaagaaatggtgccctgcttggaaaccatgtcaatcatgttaatagtgataggagagattcccttcagcagaccaataccacccaccgtcccctgcatgtccaaaggccttcaattccacctgcaagtgatactgagaaaccgctgtttcctccagcaggaaattcggtgtgtcataaccatcataaccataattccataggaaagcaagttcccacctcaacaaatgccaatctcaataatgccaatatgtccaaagctgcccatggaaagcggcccagcattgggaaccttgagcatgtgtctgaaaatgggcatcattcttcccacaagcatgaccgggagcctcagagaaggtccagtgtgaaaagaacccgctattatgaaacttacattaggtccgactcaggagatgaacagctcccaactatttgccgggaagacccagagatacatggctatttcagggacccccactgcttgggggagcaggagtatttcagtagtgaggaatgctacgaggatgacagctcgcccacctggagcaggcaaaactatggctactacagcagatacccaggcagaaacatcgactctgagaggccccgaggctaccatcatccccaaggattcttggaggacgatgactcgcccgtttgctatgattcacggagatctccaaggagacgcctactacctcccaccccagcatcccaccggagatcctccttcaactttgagtgcctgcgccggcagagcagccaggaagaggtcccgtcgtctcccatcttcccccatcgcacggccctgcctctgcatctaatgcagcaacagatcatggcagttgccggcctagattcaagtaaagcccagaagtactcaccgagtcactcgacccggtcgtgggccacccctccagcaacccctccctaccgggactggacaccgtgctacacccccctgatccaagtggagcagtcagaggccctggaccaggtgaacggcagcctgccgtccctgcaccgcagctcctggtacacagacgagcccgacatctcctaccggactttcacaccagccagcctgactgtccccagcagcttccggaacaaaaacagcgacaagcagaggagtgcggacagcttggtggaggcagtcctgatatccgaaggcttgggacgctatgcaagggacccaaaatttgtgtcagcaacaaaacacgaaatcgctgatgcctgtgacctcaccatcgacgagatggagagtgcagccagcaccctgcttaatgggaacgtgcgtccccgagccaacggggatgtgggccccctctcacaccggcaggactatgagctacaggactttggtcctggctacagcgacgaagagccagaccctgggagggatgaggaggacctggcggatgaaatgatatgcatcaccaccttgtagcccccagcgaggggcagactggctctggcctcaggtggggcgcaggagagccaggggaaaagtgcctcatagttaggaaagtttaggcactagttgggagtaatattcaattaattagacttttgtataagagatgtcatgcctcaagaaagccataaacctggtaggaacaggtcccaagcggttgagcctggcagagtaccatgcgctcggccccagctgcaggaaacagcaggccccgccctctcacagaggatgggtgaggaggccagacctgccctgccccattgtccagatgggcactgctgtggagtctgcttctcccatgtaccagggcaccaggcccacccaactgaaggcatggcggcggggtgcaggggaaagttaaaggtgatgacgatcatcacacctgtgtcgttacctcagccatcggtctagcatatcagtcactgggcccaacatatccatttttaaaccctttcccccaaatacactgcgtcctggttcctgtttagctgttctgaaatacggtgtgtaagtaagtcagaacccagctaccagtgattattgcgagggcaatgggacctcataaataaggttttctgtgatgtgacgccagtttacataagagaatatcactccgatggtcggtttctgactgtcacgctaagggcaactgtaaactggaataataatgcactcgcaaccaggtaaacttagatacactagtttgtttaaaattatagatttactgtacatgacttgtaatatactataatttgtatttgtaaagagatggtctatattttgtaattactgtattgtatttgaactgcagcaatatccatgggtcctaataattgtagttccccactaaaatctagaaattattagtatttttactcgggctatccagaagtagaagaaatagagccaattctcatttattcagcgaaaatcctctggggttaaaattttaagtttgaaagaacttgacactacagaaatttttctaaaatattttgagtcactataaacctatcatctttccacaagatataccagatgactatttgcagtcttttctttgggcaagagttccatgattttgatactgtacctttggatccaccatgggttgcaactgtctttggttttgtttgtttgacttgaaccaccctctggtaagtaagtgaattacagagcaggtccagctggctgctctgccccttgggtatccatagttacggttttctctgtggcccacccagggtgttttttgcatcgctggtgcagaaatgcataggtggatgagatatagctgctcttgtcctctggggactggtggtgctgcttaagaaataaggggtgctggggacagaggagcaacgtggtgatctataggattggagtgtcggggtctgtacaaatcgtattgttgccttttacaaaactgctgtactgtatgttctctttgagggcttttgtatgcaattgaatgagggctgaagaagttttcattagaatgcactcacactctgactgtacgtcctgatgaaaacccacttttggataattagaaccgtcaaggcttcattttctgtcaacagaattaggccgactgtcaagttaccttggcagggattccctgcaatcaaaaagatagatgataggtagcaattttggtccaaaatttttaatagtatacagacaacctgttaattttttttttttttttttttgtaaataacaaacaccactttgttatgaagaccttacaaacctcttcttaagacattcttactctgatccaggcaaaaacacttcaaggtttgtaaatgactctttcctgacataaatccttttttattaaaatgcaaaatgttcttcagaataaaactgtgtaataatttttatacttgggagtgctccttgcacagagctgtcatttgccagtgagagcctccgacggggcaggtactgtgccagggcagctctgaaattatggatattcttatcctcctggttccttcggtgccaatggtaacctaataccagccgcagggagcgccatttctcctaaagggctacaccactgtcaacattatcctggactctgtgtctctctctgttgggtcttgtggcatcacatcaggccaaaattgccagaccaggaccctaagtgtctgatagaggcgatgatcttttccaaagtcagtacttacaaactggcattcttacaggctgcaccatttcctagtatgtctgctttaagcctggttcaacctctcatcgaatattaaatttttctttgtaagaaaaa

SEQ ID NO: 719 - DNA, 4221 bp, Homo sapiens
attttgagccttagttgctttgcaaaaccttgctttttgctggtttgagacccctgtgttatatgctgagacctcggtgccttctgcgccggaccgcccacccgccccactctgcccctgcccctgccccagccagaagcaagtgtttaggctcttggtctaatgtgctgattcgggagagctctgtctggtctctccgtttagatgatgaggtaaccgtggggaagttctatgccactttcctgatacaggactactttaggaaattcaagaaacggaaagaacaaggactggtgggaaagtaccctgcgaagaacaccacaattgccctacaggcgggattaaggacactgcatgacattgggccagaaatccggcgtgctatatcgtgtgatttgcaagatgacgagcctgaggaaacaaaacgagaagaagaagatgatgtgttcaaaagaaatggtgccctgcttggaaaccatgtcaatcatgttaatagtgataggagagattcccttcagcagaccaataccacccaccgtcccctgcatgtccaaaggccttcaattccacctgcaagtgatactgagaaaccgctgtttcctccagcaggaaattcggtgtgtcataaccatcataaccataattccataggaaagcaagttcccacctcaacaaatgccaatctcaataatgccaatatgtccaaagctgcccatggaaagcggcccagcattgggaaccttgagcatgtgtctgaaaatgggcatcattcttcccacaagcatgaccgggagcctcagagaaggtccagtgtgaaaagaacccgctattatgaaacttacattaggtccgactcaggagatgaacagctcccaactatttgccgggaagacccagagatacatggctatttcagggacccccactgcttgggggagcaggagtatttcagtagtgaggaatgctacgaggatgacagctcgcccacctggagcaggcaaaactatggctactacagcagatacccaggcagaaacatcgactctgagaggccccgaggctaccatcatccccaaggattcttggaggacgatgactcgcccgtttgctatgattcacggagatctccaaggagacgcctactacctcccaccccagcatcccaccggagatcctccttcaactttgagtgcctgcgccggcagagcagccaggaagaggtcccgtcgtctcccatcttcccccatcgcacggccctgcctctgcatctaatgcagcaacagatcatggcagttgccggcctagattcaagtaaagcccagaagtactcaccgagtcactcgacccggtcgtgggccacccctccagcaacccctccctaccgggactggacaccgtgctacacccccctgatccaagtggagcagtcagaggccctggaccaggtgaacggcagcctgccgtccctgcaccgcagctcctggtacacagacgagcccgacatctcctaccggactttcacaccagccagcctgactgtccccagcagcttccggaacaaaaacagcgacaagcagaggagtgcggacagcttggtggaggcagtcctgatatccgaaggcttgggacgctatgcaagggacccaaaatttgtgtcagcaacaaaacacgaaatcgctgatgcctgtgacctcaccatcgacgagatggagagtgcagccagcaccctgcttaatgggaacgtgcgtccccgagccaacggggatgtgggccccctctcacaccggcaggactatgagctacaggactttggtcctggctacagcgacgaagagccagaccctgggagggatgaggaggacctggcggatgaaatgatatgcatcaccaccttgtagcccccagcgaggggcagactggctctggcctcaggtggggcgcaggagagccaggggaaaagtgcctcatagttaggaaagtttaggcactagttgggagtaatattcaattaattagacttttgtataagagatgtcatgcctcaagaaagccataaacctggtaggaacaggtcccaagcggttgagcctggcagagtaccatgcgctcggccccagctgcaggaaacagcaggccccgccctctcacagaggatgggtgaggaggccagacctgccctgccccattgtccagatgggcactgctgtggagtctgcttctcccatgtaccagggcaccaggcccacccaactgaaggcatggcggcggggtgcaggggaaagttaaaggtgatgacgatcatcacacctgtgtcgttacctcagccatcggtctagcatatcagtcactgggcccaacatatccatttttaaaccctttcccccaaatacactgcgtcctggttcctgtttagctgttctgaaatacggtgtgtaagtaagtcagaacccagctaccagtgattattgcgagggcaatgggacctcataaataaggttttctgtgatgtgacgccagtttacataagagaatatcactccgatggtcggtttctgactgtcacgctaagggcaactgtaaactggaataataatgcactcgcaaccaggtaaacttagatacactagtttgtttaaaattatagatttactgtacatgacttgtaatatactataatttgtatttgtaaagagatggtctatattttgtaattactgtattgtatttgaactgcagcaatatccatgggtcctaataattgtagttccccactaaaatctagaaattattagtatttttactcgggctatccagaagtagaagaaatagagccaattctcatttattcagcgaaaatcctctggggttaaaattttaagtttgaaagaacttgacactacagaaatttttctaaaatattttgagtcactataaacctatcatctttccacaagatataccagatgactatttgcagtcttttctttgggcaagagttccatgattttgatactgtacctttggatccaccatgggttgcaactgtctttggttttgtttgtttgacttgaaccaccctctggtaagtaagtgaattacagagcaggtccagctggctgctctgccccttgggtatccatagttacggttttctctgtggcccacccagggtgttttttgcatcgctggtgcagaaatgcataggtggatgagatatagctgctcttgtcctctggggactggtggtgctgcttaagaaataaggggtgctggggacagaggagcaacgtggtgatctataggattggagtgtcggggtctgtacaaatcgtattgttgccttttacaaaactgctgtactgtatgttctctttgagggcttttgtatgcaattgaatgagggctgaagaagttttcattagaatgcactcacactctgactgtacgtcctgatgaaaacccacttttggataattagaaccgtcaaggcttcattttctgtcaacagaattaggccgactgtcaagttaccttggcagggattccctgcaatcaaaaagatagatgataggtagcaattttggtccaaaatttttaatagtatacagacaacctgttaattttttttttttttttttttgtaaataacaaacaccactttgttatgaagaccttacaaacctcttcttaagacattcttactctgatccaggcaaaaacacttcaaggtttgtaaatgactctttcctgacataaatccttttttattaaaatgcaaaatgttcttcagaataaaactgtgtaataatttttatacttgggagtgctccttgcacagagctgtcatttgccagtgagagcctccgacggggcaggtactgtgccagggcagctctgaaattatggatattcttatcctcctggttccttcggtgccaatggtaacctaataccagccgcagggagcgccatttctcctaaagggctacaccactgtcaacattatcctggactctgtgtctctctctgttgggtcttgtggcatcacatcaggccaaaattgccagaccaggaccctaagtgtctgatagaggcgatgatcttttccaaagtcagtacttacaaactggcattcttacaggctgcaccatttcctagtatgtctgctttaagcctggttcaacctctcatcgaatattaaatttttctttgtaagaaaaa

SEQ ID NO: 720 - DNA, 5342 bp, Homo sapiens
gagcatccccagaccagtgggacccagccctgatggatctggccagactgcagccaccatcccctcctcctccctgaaccactgctgggcatctgttctaccccatgcttgtctcagggatggtcatcatgcctatctgtccttgccacagctgcccacatgctaagaggtgttgtggaggaaggacagggaagcggtctcctctccgaggacccaccacttagtccagttttcctttgcaaaccaccctgaggttgaagcatttgctgcacatccattgtcttagctgttctccaggcctttagggctacagagctgtggacagactgccagtgagtgaggaggggctgcctggatacaggaccgtagacccagggcagagaggacatgccttcttcagatgcaggactttctgtggaaaagaataaagttgccatacagtccctattagtctttaactcagcatactgttttccttcaaactggtggtcaaaacatcatcattctctcagagctggagcagtaccttcctccatgcaccgtgcataagcatcttggaatgcttccctaatgaagtcgtgaacaatggaagggcttatcctgggccctgtctcaacatagcagggaccacagtgaggaaggcagctgtgagggcgccaggggagatgcagagtatctgtgacgggcccagagggatctaccaggggtgtcttctggtgggtcttgcactgcctgcaaaggctgataagccactttcagtttgttgtgatcttcaaaaagcggaccccctgttggtgagttctcagcctgcacacaggctacaggccagggtatcctgatgaccacggtggccgggtcggtgtgcgtgtcagtctgctccgtcgtggtccgagtgtgctggtggttgcagtgtgttgtgtcactcactcgttccatggctttttagcagaaccagtggcctgaggactgcttggtctgcttgtgcctctggcacctacacctaggcttcctcatcctagatgcagcaagggagtccacatcagcctccctttagatcggccaggctgtgctccttgccctgctctgggcttggagagatagggctcttgtaggcgagcctactgaagactgtcactgagacaggggcataagctcttggcctggcagatcctagcactagtaaccaggcagtgttccttggaagtgggggttttgcaaaggaggttacggggttgcaggcctcaggcatcctacctaggaccttcttgaccctctggatgcctgaccataccaacaacccttagactgccttcagtgacatcagtcagtgccctggattggcttttggggaagccttcctccccaccgctgaatcaggaaggagcaaagccaggacccaggctggccccagggcccatgtgtggtctaacctgttctgccattttcattgatctaggcgggattaaggacactgcatgacattgggccagaaatccggcgtgctatatcgtgtgatttgcaagatgacgagcctgaggaaacaaaacgagaagaagaagatgatgtgttcaaaagaaatggtgccctgcttggaaaccatgtcaatcatgttaatagtgataggagagattcccttcagcagaccaataccacccaccgtcccctgcatgtccaaaggccttcaattccacctgcaagtgatactgagaaaccgctgtttcctccagcaggaaattcggtgtgtcataaccatcataaccataattccataggaaagcaagttcccacctcaacaaatgccaatctcaataatgccaatatgtccaaagctgcccatggaaagcggcccagcattgggaaccttgagcatgtgtctgaaaatgggcatcattcttcccacaagcatgaccgggagcctcagagaaggtccagtgtgaaaagaacccgctattatgaaacttacattaggtccgactcaggagatgaacagctcccaactatttgccgggaagacccagagatacatggctatttcagggacccccactgcttgggggagcaggagtatttcagtagtgaggaatgctacgaggatgacagctcgcccacctggagcaggcaaaactatggctactacagcagatacccaggcagaaacatcgactctgagaggccccgaggctaccatcatccccaaggattcttggaggacgatgactcgcccgtttgctatgattcacggagatctccaaggagacgcctactacctcccaccccagcatcccaccggagatcctccttcaactttgagtgcctgcgccggcagagcagccaggaagaggtcccgtcgtctcccatcttcccccatcgcacggccctgcctctgcatctaatgcagcaacagatcatggcagttgccggcctagattcaagtaaagcccagaagtactcaccgagtcactcgacccggtcgtgggccacccctccagcaacccctccctaccgggactggacaccgtgctacacccccctgatccaagtggagcagtcagaggccctggaccaggtgaacggcagcctgccgtccctgcaccgcagctcctggtacacagacgagcccgacatctcctaccggactttcacaccagccagcctgactgtccccagcagcttccggaacaaaaacagcgacaagcagaggagtgcggacagcttggtggaggcagtcctgatatccgaaggcttgggacgctatgcaagggacccaaaatttgtgtcagcaacaaaacacgaaatcgctgatgcctgtgacctcaccatcgacgagatggagagtgcagccagcaccctgcttaatgggaacgtgcgtccccgagccaacggggatgtgggccccctctcacaccggcaggactatgagctacaggactttggtcctggctacagcgacgaagagccagaccctgggagggatgaggaggacctggcggatgaaatgatatgcatcaccaccttgtagcccccagcgaggggcagactggctctggcctcaggtggggcgcaggagagccaggggaaaagtgcctcatagttaggaaagtttaggcactagttgggagtaatattcaattaattagacttttgtataagagatgtcatgcctcaagaaagccataaacctggtaggaacaggtcccaagcggttgagcctggcagagtaccatgcgctcggccccagctgcaggaaacagcaggccccgccctctcacagaggatgggtgaggaggccagacctgccctgccccattgtccagatgggcactgctgtggagtctgcttctcccatgtaccagggcaccaggcccacccaactgaaggcatggcggcggggtgcaggggaaagttaaaggtgatgacgatcatcacacctgtgtcgttacctcagccatcggtctagcatatcagtcactgggcccaacatatccatttttaaaccctttcccccaaatacactgcgtcctggttcctgtttagctgttctgaaatacggtgtgtaagtaagtcagaacccagctaccagtgattattgcgagggcaatgggacctcataaataaggttttctgtgatgtgacgccagtttacataagagaatatcactccgatggtcggtttctgactgtcacgctaagggcaactgtaaactggaataataatgcactcgcaaccaggtaaacttagatacactagtttgtttaaaattatagatttactgtacatgacttgtaatatactataatttgtatttgtaaagagatggtctatattttgtaattactgtattgtatttgaactgcagcaatatccatgggtcctaataattgtagttccccactaaaatctagaaattattagtatttttactcgggctatccagaagtagaagaaatagagccaattctcatttattcagcgaaaatcctctggggttaaaattttaagtttgaaagaacttgacactacagaaatttttctaaaatattttgagtcactataaacctatcatctttccacaagatataccagatgactatttgcagtcttttctttgggcaagagttccatgattttgatactgtacctttggatccaccatgggttgcaactgtctttggttttgtttgtttgacttgaaccaccctctggtaagtaagtgaattacagagcaggtccagctggctgctctgccccttgggtatccatagttacggttttctctgtggcccacccagggtgttttttgcatcgctggtgcagaaatgcataggtggatgagatatagctgctcttgtcctctggggactggtggtgctgcttaagaaataaggggtgctggggacagaggagcaacgtggtgatctataggattggagtgtcggggtctgtacaaatcgtattgttgccttttacaaaactgctgtactgtatgttctctttgagggcttttgtatgcaattgaatgagggctgaagaagttttcattagaatgcactcacactctgactgtacgtcctgatgaaaacccacttttggataattagaaccgtcaaggcttcattttctgtcaacagaattaggccgactgtcaagttaccttggcagggattccctgcaatcaaaaagatagatgataggtagcaattttggtccaaaatttttaatagtatacagacaacctgttaattttttttttttttttttttgtaaataacaaacaccactttgttatgaagaccttacaaacctcttcttaagacattcttactctgatccaggcaaaaacacttcaaggtttgtaaatgactctttcctgacataaatccttttttattaaaatgcaaaatgttcttcagaataaaactgtgtaataatttttatacttgggagtgctccttgcacagagctgtcatttgccagtgagagcctccgacggggcaggtactgtgccagggcagctctgaaattatggatattcttatcctcctggttccttcggtgccaatggtaacctaataccagccgcagggagcgccatttctcctaaagggctacaccactgtcaacattatcctggactctgtgtctctctctgttgggtcttgtggcatcacatcaggccaaaattgccagaccaggaccctaagtgtctgatagaggcgatgatcttttccaaagtcagtacttacaaactggcattcttacaggctgcaccatttcctagtatgtctgctttaagcctggttcaacctctcatcgaatattaaatttttctttgtaagaaaaa

SEQ ID NO: 721 - DNA, 1973 bp, Homo sapiens
gggcgagcgcctccgtccccggatgtgagctccggctgcccgcggtcccgagccagcggcggcgcgggcggcggcggcgggcaccgggcaccgcggcgggcgggcagacgggcgggcatggggggagcgccgagcggccccggcggccgggccggcatcaccgcggcgtctctccgctagaggaggggacaagccagttctcctttgcagcaaaaaattacatgtatatattattaagataatatatacattggattttatttttttaaaaagtttattttgctccatttttgaaaaagagagagcttgggtggcgagcggttttttttttaaatcaattatccttattttctgttatttgtccccgtccctccccacccccctgctgaagcgagaataagggcagggaccgcggctcctacctcttggtgatccccttccccattccgcccccgcctcaacgcccagcacagtgccctgcacacagtagtcgctcaataaatgttcgtggatgatgatgatgatgatgatgaaaaaaatgcagcatcaacggcagcagcaagcggaccacgcgaacgaggcaaactatgcaagaggcaccagacttcctctttctggtgaaggaccaacttctcagccgaatagctccaagcaaactgtcctgtcttggcaagctgcaatcgatgctgctagacaggccaaggctgcccaaactatgagcacctctgcacccccacctgtaggatctctctcccaaagaaaacgtcagcaatacgccaagagcaaaaaacagggtaactcgtccaacagccgacctgcccgcgcccttttctgtttatcactcaataaccccatccgaagagcctgcattagtatagtggaatggaaaccatttgacatatttatattattggctatttttgccaattgtgtggccttagctatttacatcccattccctgaagatgattctaattcaacaaatcataacttggaaaaagtagaatatgccttcctgattatttttacagtcgagacatttttgaagattatagcgtatggattattgctacatcctaatgcttatgttaggaatggatggaatttactggattttgttatagtaatagtaggattgtttagtgtaattttggaacaattaaccaaagaaacagaaggcgggaaccactcaagcggcaaatctggaggctttgatgtcaaagccctccgtgcctttcgagtgttgcgaccacttcgactagtgtcaggagtgcccagtttacaagttgtcctgaactccattataaaagccatggttcccctccttcacatagcccttttggtattatttgtaatcataatctatgctattataggattggaactttttattggaaaaatgcacaaaacatgtttttttgctgactcagatatcgtagctgaagaggacccagctccatgtgcgttctcagggaatggacgccagtgtactgccaatggcacggaatgtaggagtggctgggttggcccgaacggaggcatcaccaactttgataactttgcctttgccatgcttactgtgtttcagtgcatcaccatggagggctggacagacgtgctctactgggtaaatgatgcgataggatgggaatggccatgggtgtattttgttagtctgatcatccttggctcatttttcgtccttaacctggttcttggtgtccttagtgggtaagcagtcggatccgtgttgcaccttctcctgctgccacgtgtgaggcaactctgcgtgtctcctagctgctccctgacagcttctctgcatgtgtttggactctgatgtcctctcagtgtgttgcttttggattgaactgtgattctttctgcctgtatctgtctgtgagattccgtgtttccaatgcttgccaaacactgttaatttaatgaaaacgttcccccaaagccagttgtgt

SEQ ID NO: 722 - DNA, 3379 bp, Homo sapiens
gggcgagcgcctccgtccccggatgtgagctccggctgcccgcggtcccgagccagcggcggcgcgggcggcggcggcgggcaccgggcaccgcggcgggcgggcagacgggcgggcatggggggagcgccgagcggccccggcggccgggccggcatcaccgcggcgtctctccgctagaggaggggacaagccagttctcctttgcagcaaaaaattacatgtatatattattaagataatatatacattggattttatttttttaaaaagtttattttgctccatttttgaaaaagagagagcttgggtggcgagcggttttttttttaaatcaattatccttattttctgttatttgtccccgtccctccccacccccctgctgaagcgagaataagggcagggaccgcggctcctacctcttggtgatccccttccccattccgcccccgcctcaacgcccagcacagtgccctgcacacagtagtcgctcaataaatgttcgtggatgatgatgatgatgatgatgaaaaaaatgcagcatcaacggcagcagcaagcggaccacgcgaacgaggcaaactatgcaagaggcaccagacttcctctttctggtgaaggaccaacttctcagccgaatagctccaagcaaactgtcctgtcttggcaagctgcaatcgatgctgctagacaggccaaggctgcccaaactatgagcacctctgcacccccacctgtaggatctctctcccaaagaaaacgtcagcaatacgccaagagcaaaaaacagggtaactcgtccaacagccgacctgcccgcgcccttttctgtttatcactcaataaccccatccgaagagcctgcattagtatagtggaatggaaaccatttgacatatttatattattggctatttttgccaattgtgtggccttagctatttacatcccattccctgaagatgattctaattcaacaaatcataacttggaaaaagtagaatatgccttcctgattatttttacagtcgagacatttttgaagattatagcgtatggattattgctacatcctaatgcttatgttaggaatggatggaatttactggattttgttatagtaatagtaggattgtttagtgtaattttggaacaattaaccaaagaaacagaaggcgggaaccactcaagcggcaaatctggaggctttgatgtcaaagccctccgtgcctttcgagtgttgcgaccacttcgactagtgtcaggagtgcccagtttacaagttgtcctgaactccattataaaagccatggttcccctccttcacatagcccttttggtattatttgtaatcataatctatgctattataggattggaactttttattggaaaaatgcacaaaacatgtttttttgctgactcagatatcgtagctgaagaggacccagctccatgtgcgttctcagggaatggacgccagtgtactgccaatggcacggaatgtaggagtggctgggttggcccgaacggaggcatcaccaactttgataactttgcctttgccatgcttactgtgtttcagtgcatcaccatggagggctggacagacgtgctctactggatgaatgatgctatgggatttgaattgccctgggtgtattttgtcagtctcgtcatctttgggtcatttttcgtactaaatcttgtacttggtgtattgagcgggcacggtggctcacgcctataatcccagcactttcggaggccgaggcagctggaccacccgagatcaggagtttgagaccagcctgactaaggcagtgaaaccctgtctctactaagaatacaaaaattagccaggcatggtggcgcatgcctgtaatcccagctacttgggaggctgaggcaggagaatcacttgaaccagggaggtggagattgcagtgagccaagactgcaccattgcattccagcctgggtgacaagagcaaaactccatctcaaaaaaaaaaaaaaaaaaaaaaaaaaaaaaaaaaaaagacttttctctcattcaacactttaccagcatctactgacagaaaatggacaattgaatttcctccaatatatatacctctgatatgtctgctttgtaaaagagtagtgtaattgcttacaacattgaaaaggttgttattggggtcctggggtagccaggatatcggcatgatttgtcaccatattcagaataaaactgtactgcaatagtgagttaattccatatcttggccaacagagaatttttggccagtggctactaaggcacacggaagtccagtctaaaagggacaggggaggactctttgtagatagttcttatgattaaaaaataacttcctatgtgttgtagtgatgattaagctgacagaatgctaaagacacccttaatgattacttgtagcaaagtacttccccacatttagctggatttgtctttggtttgaagaggctaatacgtgaaagatttgttcacagttggatgtccccttttctgaaccatgaagtaatattgtgaatggagttgaatgctgaggttagggtgccggaaagattcagggtccttcggtaccctcacatggcttggctttggtagaacaagaaactaagctctgatttggctttaaatgagagtgctaaatttcctttttctaataaagaacctagctaaacatttatatatacttttgaacactgaactttcttgttgcagagttaacagctgttgggggtagctgacagctggatcctggtgctgttggtaccatggtacctgaagtgcacaggctggtagccacacctgacattaacaagtgagtggtaacctctctgccgctggctcacagctactgtttccatagaaatggctgtcgggatcagtggaaacgaggtaagtgaaagttttcgctgatccttgtttccatcaagctgacgtctgtttccctggcaacagcagtggacagcagccaggcgctagcaacagattcagtagagctctcacttgtcagctgtggctatcatctgttcctgaccaagttcttttttttttttttaataatgtacagaaagacctctgaggacccaggaggcacctctggccacatgtgccctcctggatgctcgttttgcagatggagagctgtgtgctgagttgacttctctgtccgcagttccccctccacctgtgctctgggttgttgatgtgcaggttaaaagagggaggttgttgagggtattagtgttgcaggggaggctgttgaatctggttgatcccaaatccctaggggaagagaattcattacagtgctttcatgcacagacccagctctttata

SEQ ID NO: 723 - DNA, 468 bp, Artificial
  Synthetic oligonucleotide
gggcgagcgcctccgtccccggatgtgagctccggctgcccgcggtcccgagccagcggcggcgcgggcggcggcggcgggcaccgggcaccgcggcgggcgggcagacgggcgggcatggggggagcgccgagcggccccggcggccgggccggcatcaccgcggcgtctctccgctagaggaggggacaagccagttctcctttgcagcaaaaaattacatgtatatattattaagataatatatacattggattttatttttttaaaaagtttattttgctccatttttgaaaaagagagagcttgggtggcgagcggttttttttttaaatcaattatccttattttctgttatttgtccccgtccctccccacccccctgctgaagcgagaataagggcagggaccgcggctcctacctcttggtgatccccttccccattccgcccccgcctcaacgcccag

SEQ ID NO: 724 - DNA, 310 bp, Artificial
  Synthetic oligonucleotide
aggcaaactatgcaagaggcaccagacttcctctttctggtgaaggaccaacttctcagccgaatagctccaagcaaactgtcctgtcttggcaagctgcaatcgatgctgctagacaggccaaggctgcccaaactatgagcacctctgcacccccacctgtaggatctctctcccaaagaaaacgtcagcaatacgccaagagcaaaaaacagggtaactcgtccaacagccgacctgcccgcgcccttttctgtttatcactcaataaccccatccgaagagcctgcattagtatagtggaatggaa

SEQ ID NO: 725 - DNA, 140 bp, Artificial
  Synthetic oligonucleotide
gaaaaagtagaatatgccttcctgattatttttacagtcgagacatttttgaagattatagcgtatggattattgctacatcctaatgcttatgttaggaatggatggaatttactggattttgttatagtaatagtagg

SEQ ID NO: 726 - DNA, 143 bp, Artificial
  Synthetic oligonucleotide
attgtttagtgtaattttggaacaattaaccaaagaaacagaaggcgggaaccactcaagcggcaaatctggaggctttgatgtcaaagccctccgtgcctttcgagtgttgcgaccacttcgactagtgtcaggagtgccca

SEQ ID NO: 727 - DNA, 153 bp, Artificial
  Synthetic oligonucleotide
gtttacaagttgtcctgaactccattataaaagccatggttcccctccttcacatagcccttttggtattatttgtaatcataatctatgctattataggattggaactttttattggaaaaatgcacaaaacatgtttttttgctgactcag

SEQ ID NO: 728 - DNA, 197 bp, Artificial
  Synthetic oligonucleotide
atatcgtagctgaagaggacccagctccatgtgcgttctcagggaatggacgccagtgtactgccaatggcacggaatgtaggagtggctgggttggcccgaacggaggcatcaccaactttgataactttgcctttgccatgcttactgtgtttcagtgcatcaccatggagggctggacagacgtgctctactgg

SEQ ID NO: 729 - DNA, 242 bp, Artificial
  Synthetic oligonucleotide
gtaagcagtcggatccgtgttgcaccttctcctgctgccacgtgtgaggcaactctgcgtgtctcctagctgctccctgacagcttctctgcatgtgtttggactctgatgtcctctcagtgtgttgcttttggattgaactgtgattctttctgcctgtatctgtctgtgagattccgtgtttccaatgcttgccaaacactgttaatttaatgaaaacgttcccccaaagccagttgtgt

SEQ ID NO: 730 - DNA, 1648 bp, Artificial
  Synthetic oligonucleotide
gcacggtggctcacgcctataatcccagcactttcggaggccgaggcagctggaccacccgagatcaggagtttgagaccagcctgactaaggcagtgaaaccctgtctctactaagaatacaaaaattagccaggcatggtggcgcatgcctgtaatcccagctacttgggaggctgaggcaggagaatcacttgaaccagggaggtggagattgcagtgagccaagactgcaccattgcattccagcctgggtgacaagagcaaaactccatctcaaaaaaaaaaaaaaaaaaaaaaaaaaaaaaaaaaaaagacttttctctcattcaacactttaccagcatctactgacagaaaatggacaattgaatttcctccaatatatatacctctgatatgtctgctttgtaaaagagtagtgtaattgcttacaacattgaaaaggttgttattggggtcctggggtagccaggatatcggcatgatttgtcaccatattcagaataaaactgtactgcaatagtgagttaattccatatcttggccaacagagaatttttggccagtggctactaaggcacacggaagtccagtctaaaagggacaggggaggactctttgtagatagttcttatgattaaaaaataacttcctatgtgttgtagtgatgattaagctgacagaatgctaaagacacccttaatgattacttgtagcaaagtacttccccacatttagctggatttgtctttggtttgaagaggctaatacgtgaaagatttgttcacagttggatgtccccttttctgaaccatgaagtaatattgtgaatggagttgaatgctgaggttagggtgccggaaagattcagggtccttcggtaccctcacatggcttggctttggtagaacaagaaactaagctctgatttggctttaaatgagagtgctaaatttcctttttctaataaagaacctagctaaacatttatatatacttttgaacactgaactttcttgttgcagagttaacagctgttgggggtagctgacagctggatcctggtgctgttggtaccatggtacctgaagtgcacaggctggtagccacacctgacattaacaagtgagtggtaacctctctgccgctggctcacagctactgtttccatagaaatggctgtcgggatcagtggaaacgaggtaagtgaaagttttcgctgatccttgtttccatcaagctgacgtctgtttccctggcaacagcagtggacagcagccaggcgctagcaacagattcagtagagctctcacttgtcagctgtggctatcatctgttcctgaccaagttcttttttttttttttaataatgtacagaaagacctctgaggacccaggaggcacctctggccacatgtgccctcctggatgctcgttttgcagatggagagctgtgtgctgagttgacttctctgtccgcagttccccctccacctgtgctctgggttgttgatgtgcaggttaaaagagggaggttgttgagggtattagtgttgcaggggaggctgttgaatctggttgatcccaaatccctaggggaagagaattcattacagtgctttcatgcacagacccagctctttata

SEQ ID NO: 731 - DNA, 170 bp, Artificial
  Synthetic oligonucleotide
agaattctcaaaggaaagagagaaggcaaaagcacggggagatttccagaagctccgggagaagcagcagctggaggaggatctaaagggctacttggattggatcacccaagctgaggacatcgatccggagaatgaggaagaaggaggagaggaaggcaaacgaaata

SEQ ID NO: 732 - DNA, 161 bp, Artificial
  Synthetic oligonucleotide
ccgacgctggcgtcgctggaaccgattcaatcgcagaagatgtagggccgccgtgaagtctgtcacgttttactggctggttatcgtcctggtgtttctgaacaccttaaccatttcctctgagcactacaatcagccagattggttgacacagattcaag

SEQ ID NO: 733 - DNA, 226 bp, Artificial
  Synthetic oligonucleotide
atattgccaacaaagtcctcttggctctgttcacctgcgagatgctggtaaaaatgtacagcttgggcctccaagcatatttcgtctctcttttcaaccggtttgattgcttcgtggtgtgtggtggaatcactgagacgatcttggtggaactggaaatcatgtctcccctggggatctctgtgtttcggtgtgtgcgcctcttaagaatcttcaaagtgaccag

SEQ ID NO: 734 - DNA, 208 bp, Artificial
  Synthetic oligonucleotide
gcactggacttccctgagcaacttagtggcatccttattaaactccatgaagtccatcgcttcgctgttgcttctgctttttctcttcattatcatcttttccttgcttgggatgcagctgtttggcggcaagtttaattttgatgaaacgcaaaccaagcggagcacctttgacaatttccctcaagcacttctcacagtgttccag

SEQ ID NO: 735 - DNA, 121 bp, Artificial
  Synthetic oligonucleotide
atcctgacaggcgaagactggaatgctgtgatgtacgatggcatcatggcttacgggggcccatcctcttcaggaatgatcgtctgcatctacttcatcatcctcttcatttgtggtaact

SEQ ID NO: 736 - DNA, 148 bp, Artificial
  Synthetic oligonucleotide
taggggaagaggaagaggaagaggaggaggatgaacctgaggttcctgccggaccccgtcctcgaaggatctcggagttgaacatgaaggaaaaaattgcccccatccctgaagggagcgctttcttcattcttagcaagaccaaccc

SEQ ID NO: 737 - DNA, 130 bp, Artificial
  Synthetic oligonucleotide
gatccgcgtaggctgccacaagctcatcaaccaccacatcttcaccaacctcatccttgtcttcatcatgctgagcagcgctgccctggccgcagaggaccccatccgcagccactccttccggaacacg

SEQ ID NO: 738 - DNA, 147 bp, Artificial
  Synthetic oligonucleotide
gggacttttcatcctctacaaggatggggatgttgacagtcctgtggtccgtgaacggatctggcaaaacagtgatttcaacttcgacaacgtcctctctgctatgatggcgctcttcacagtctccacgtttgagggctggcctgc

SEQ ID NO: 739 - DNA, 202 bp, Artificial
  Synthetic oligonucleotide
gttgctgtataaagccatcgactcgaatggagagaacatcggcccaatctacaaccaccgcgtggagatctccatcttcttcatcatctacatcatcattgtagctttcttcatgatgaacatctttgtgggctttgtcatcgttacatttcaggaacaaggagaaaaagagtataagaactgtgagctggacaaaaatcag

SEQ ID NO: 740 - DNA, 159 bp, Artificial
  Synthetic oligonucleotide
cgtcagtgtgttgaatacgccttgaaagcacgtcccttgcggagatacatccccaaaaacccctaccagtacaagttctggtacgtggtgaactcttcgcctttcgaatacatgatgtttgtcctcatcatgctcaacacactctgcttggccatgcag

SEQ ID NO: 741 - DNA, 129 bp, Artificial
  Synthetic oligonucleotide
aactctgaagagagcaatagaatctccatcacctttttccgtcttttccgagtgatgcgattggtgaagcttctcagcaggggggaaggcatccggacattgctgtggacttttattaagtcctttcag

SEQ ID NO: 742 - DNA, 160 bp, Artificial
  Synthetic oligonucleotide
gtgtgcaacaggtgaggcctggcaggagatcatgctggcctgtctcccagggaagctctgtgaccctgagtcagattacaaccccggggaggagtatacatgtgggagcaactttgccattgtctatttcatcagtttttacatgctctgtgcatttctg

SEQ ID NO: 743 - DNA, 128 bp, Artificial
  Synthetic oligonucleotide
atcatcaatctgtttgtggctgtcatcatggataatttcgactatctgacccgggactggtctattttggggcctcaccatttagatgaattcaaaagaatatggtcagaatatgaccctgaggcaaa

SEQ ID NO: 744 - DNA, 204 bp, Artificial
  Synthetic oligonucleotide
attttgagccttagttgctttgcaaaaccttgctttttgctggtttgagacccctgtgttatatgctgagacctcggtgccttctgcgccggaccgcccacccgccccactctgcccctgcccctgccccagccagaagcaagtgtttaggctcttggtctaatgtgctgattcgggagagctctgtctggtctctccgtttag

SEQ ID NO: 745 - DNA, 131 bp, Artificial
  Synthetic oligonucleotide
atgatgaggtaaccgtggggaagttctatgccactttcctgatacaggactactttaggaaattcaagaaacggaaagaacaaggactggtgggaaagtaccctgcgaagaacaccacaattgccctacag

SEQ ID NO: 746 - DNA, 1456 bp, Artificial
  Synthetic oligonucleotide
gagcatccccagaccagtgggacccagccctgatggatctggccagactgcagccaccatcccctcctcctccctgaaccactgctgggcatctgttctaccccatgcttgtctcagggatggtcatcatgcctatctgtccttgccacagctgcccacatgctaagaggtgttgtggaggaaggacagggaagcggtctcctctccgaggacccaccacttagtccagttttcctttgcaaaccaccctgaggttgaagcatttgctgcacatccattgtcttagctgttctccaggcctttagggctacagagctgtggacagactgccagtgagtgaggaggggctgcctggatacaggaccgtagacccagggcagagaggacatgccttcttcagatgcaggactttctgtggaaaagaataaagttgccatacagtccctattagtctttaactcagcatactgttttccttcaaactggtggtcaaaacatcatcattctctcagagctggagcagtaccttcctccatgcaccgtgcataagcatcttggaatgcttccctaatgaagtcgtgaacaatggaagggcttatcctgggccctgtctcaacatagcagggaccacagtgaggaaggcagctgtgagggcgccaggggagatgcagagtatctgtgacgggcccagagggatctaccaggggtgtcttctggtgggtcttgcactgcctgcaaaggctgataagccactttcagtttgttgtgatcttcaaaaagcggaccccctgttggtgagttctcagcctgcacacaggctacaggccagggtatcctgatgaccacggtggccgggtcggtgtgcgtgtcagtctgctccgtcgtggtccgagtgtgctggtggttgcagtgtgttgtgtcactcactcgttccatggctttttagcagaaccagtggcctgaggactgcttggtctgcttgtgcctctggcacctacacctaggcttcctcatcctagatgcagcaagggagtccacatcagcctccctttagatcggccaggctgtgctccttgccctgctctgggcttggagagatagggctcttgtaggcgagcctactgaagactgtcactgagacaggggcataagctcttggcctggcagatcctagcactagtaaccaggcagtgttccttggaagtgggggttttgcaaaggaggttacggggttgcaggcctcaggcatcctacctaggaccttcttgaccctctggatgcctgaccataccaacaacccttagactgccttcagtgacatcagtcagtgccctggattggcttttggggaagccttcctccccaccgctgaatcaggaaggagcaaagccaggacccaggctggccccagggcccatgtgtggtctaacctgttctgccattttcattgatctag

SEQ ID NO: 747 - DNA, 368 bp, Artificial
  Synthetic oligonucleotide
agaaatggtgccctgcttggaaaccatgtcaatcatgttaatagtgataggagagattcccttcagcagaccaataccacccaccgtcccctgcatgtccaaaggccttcaattccacctgcaagtgatactgagaaaccgctgtttcctccagcaggaaattcggtgtgtcataaccatcataaccataattccataggaaagcaagttcccacctcaacaaatgccaatctcaataatgccaatatgtccaaagctgcccatggaaagcggcccagcattgggaaccttgagcatgtgtctgaaaatgggcatcattcttcccacaagcatgaccgggagcctcagagaaggtccagtgtgaaaag

SEQ ID NO: 748 - DNA, 150 bp, Artificial
  Synthetic oligonucleotide
gtccgactcaggagatgaacagctcccaactatttgccgggaagacccagagatacatggctatttcagggacccccactgcttgggggagcaggagtatttcagtagtgaggaatgctacgaggatgacagctcgcccacctggagcag

SEQ ID NO: 749 - DNA, 179 bp, Artificial
  Synthetic oligonucleotide
gtgagctgctctggctcctgtggagagcgggaggccgccctgccctggtgctcggcccactccggaagccagggccaccggcagctgcacttgggcttcccctaaaaagcaaaatgggagcagaaactccaggccagagggagagtggagctggagaaagagagccgcagagaggcagg

SEQ ID NO: 750 - DNA, 164 bp, Artificial
  Synthetic oligonucleotide
gcaaaactatggctactacagcagatacccaggcagaaacatcgactctgagaggccccgaggctaccatcatccccaaggattcttggaggacgatgactcgcccgtttgctatgattcacggagatctccaaggagacgcctactacctcccaccccagcat

SEQ ID NO: 751 - DNA, 122 bp, Artificial
  Synthetic oligonucleotide
cccaccggagatcctccttcaactttgagtgcctgcgccggcagagcagccaggaagaggtcccgtcgtctcccatcttcccccatcgcacggccctgcctctgcatctaatgcagcaacag

SEQ ID NO: 752 - DNA, 321 bp, Artificial
  Synthetic oligonucleotide
atcatggcagttgccggcctagattcaagtaaagcccagaagtactcaccgagtcactcgacccggtcgtgggccacccctccagcaacccctccctaccgggactggacaccgtgctacacccccctgatccaagtggagcagtcagaggccctggaccaggtgaacggcagcctgccgtccctgcaccgcagctcctggtacacagacgagcccgacatctcctaccggactttcacaccagccagcctgactgtccccagcagcttccggaacaaaaacagcgacaagcagaggagtgcggacagcttggtggaggca

SEQ ID NO: 753 - DNA, 787 bp, Artificial
  Synthetic oligonucleotide
gtcctgatatccgaaggcttgggacgctatgcaagggacccaaaatttgtgtcagcaacaaaacacgaaatcgctgatgcctgtgacctcaccatcgacgagatggagagtgcagccagcaccctgcttaatgggaacgtgcgtccccgagccaacggggatgtgggccccctctcacaccggcaggactatgagctacaggactttggtcctggctacagcgacgaagagccagaccctgggagggatgaggaggacctggcggatgaaatgatatgcatcaccaccttgtagcccccagcgaggggcagactggctctggcctcaggtggggcgcaggagagccaggggaaaagtgcctcatagttaggaaagtttaggcactagttgggagtaatattcaattaattagacttttgtataagagatgtcatgcctcaagaaagccataaacctggtaggaacaggtcccaagcggttgagcctggcagagtaccatgcgctcggccccagctgcaggaaacagcaggccccgccctctcacagaggatgggtgaggaggccagacctgccctgccccattgtccagatgggcactgctgtggagtctgcttctcccatgtaccagggcaccaggcccacccaactgaaggcatggcggcggggtgcaggggaaagttaaaggtgatgacgatcatcacacctgtgtcgttacctcagccatcggtctagcatatcagtcactgggcccaacatatccatttttaaaccctttcccccaaataca

SEQ ID NO: 754 - DNA, 1661 bp, Artificial
  Synthetic oligonucleotide
ataaggttttctgtgatgtgacgccagtttacataagagaatatcactccgatggtcggtttctgactgtcacgctaagggcaactgtaaactggaataataatgcactcgcaaccaggtaaacttagatacactagtttgtttaaaattatagatttactgtacatgacttgtaatatactataatttgtatttgtaaagagatggtctatattttgtaattactgtattgtatttgaactgcagcaatatccatgggtcctaataattgtagttccccactaaaatctagaaattattagtatttttactcgggctatccagaagtagaagaaatagagccaattctcatttattcagcgaaaatcctctggggttaaaattttaagtttgaaagaacttgacactacagaaatttttctaaaatattttgagtcactataaacctatcatctttccacaagatataccagatgactatttgcagtcttttctttgggcaagagttccatgattttgatactgtacctttggatccaccatgggttgcaactgtctttggttttgtttgtttgacttgaaccaccctctggtaagtaagtgaattacagagcaggtccagctggctgctctgccccttgggtatccatagttacggttttctctgtggcccacccagggtgttttttgcatcgctggtgcagaaatgcataggtggatgagatatagctgctcttgtcctctggggactggtggtgctgcttaagaaataaggggtgctggggacagaggagcaacgtggtgatctataggattggagtgtcggggtctgtacaaatcgtattgttgccttttacaaaactgctgtactgtatgttctctttgagggcttttgtatgcaattgaatgagggctgaagaagttttcattagaatgcactcacactctgactgtacgtcctgatgaaaacccacttttggataattagaaccgtcaaggcttcattttctgtcaacagaattaggccgactgtcaagttaccttggcagggattccctgcaatcaaaaagatagatgataggtagcaattttggtccaaaatttttaatagtatacagacaacctgttaattttttttttttttttttttgtaaataacaaacaccactttgttatgaagaccttacaaacctcttcttaagacattcttactctgatccaggcaaaaacacttcaaggtttgtaaatgactctttcctgacataaatccttttttattaaaatgcaaaatgttcttcagaataaaactgtgtaataatttttatacttgggagtgctccttgcacagagctgtcatttgccagtgagagcctccgacggggcaggtactgtgccagggcagctctgaaattatggatattcttatcctcctggttccttcggtgccaatggtaacctaataccagccgcagggagcgccatttctcctaaagggctacaccactgtcaacattatcctggactctgtgtctctctctgttgggtcttgtggcatcacatcaggccaaaattgccagaccaggaccctaagtgtctgatagaggcgatgatcttttccaaagtcagtacttacaaactggcattcttacaggctgcaccat

SEQ ID NO: 755 - DNA, 148 bp, Artificial
  Synthetic oligonucleotide
tctagtgcctggacccaagtcctgtccacatctgttcacccctcacagggggctcacccagcaccacaccataaaatgtcagctatttgccaaaaggatggcatcagctctgctctctaccagggccaattctgccactgcccatgcc

SEQ ID NO: 756 - DNA, 45 bp, Artificial
  Synthetic oligonucleotide
gggcagcccgccgctggagcgcgcttaaccctttggagcccgcag

SEQ ID NO: 757 - DNA, 110 bp, Artificial
  Synthetic oligonucleotide
cacagtgccctgcacacagtagtcgctcaataaatgttcgtggatgatgatgatgatgatgatgaaaaaaatgcagcatcaacggcagcagcaagcggaccacgcgaacg

SEQ ID NO: 758 - DNA, 106 bp, Artificial
  Synthetic oligonucleotide
accatttgacatatttatattattggctatttttgccaattgtgtggccttagctatttacatcccattccctgaagatgattctaattcaacaaatcataacttg

SEQ ID NO: 759 - DNA, 104 bp, Artificial
  Synthetic oligonucleotide
atgaatgatgctatgggatttgaattgccctgggtgtattttgtcagtctcgtcatctttgggtcatttttcgtactaaatcttgtacttggtgtattgagcgg

SEQ ID NO: 760 - DNA, 104 bp, Artificial
  Synthetic oligonucleotide
gtaaatgatgcgataggatgggaatggccatgggtgtattttgttagtctgatcatccttggctcatttttcgtccttaacctggttcttggtgtccttagtgg

SEQ ID NO: 761 - DNA, 64 bp, Artificial
  Synthetic oligonucleotide
gtggctcaggatgcaggtccccaaggatgtcctgatatgtgcttgtcctctttgcctccttcag

SEQ ID NO: 762 - DNA, 88 bp, Artificial
  Synthetic oligonucleotide
ctagcatgcccaccagcgagactgagtctgtgaacacagagaacgtcagcggtgaaggcgagaaccgaggctgctgtggaagtctctg

SEQ ID NO: 763 - DNA, 60 bp, Artificial
  Synthetic oligonucleotide
gtgctggtggagacggagaggcgcggccaaggcggggccctctgggtgtcggcggtgggg

SEQ ID NO: 764 - DNA, 27 bp, Artificial
  Synthetic oligonucleotide
tcaagccatctcaaaatccaaactcag

SEQ ID NO: 765 - DNA, 115 bp, Artificial
  Synthetic oligonucleotide
atattctactgaatgtcttcttggccatcgctgtagacaatttggctgatgctgaaagtctgaacactgctcagaaagaagaagcggaagaaaaggagaggaaaaagattgccag

SEQ ID NO: 766 - DNA, 70 bp, Artificial
  Synthetic oligonucleotide
aaaagagagcctagaaaataaaaagaacaacaaaccagaagtcaaccagatagccaacagtgacaacaag

SEQ ID NO: 767 - DNA, 67 bp, Artificial
  Synthetic oligonucleotide
gttacaattgatgactatagagaagaggatgaagacaaggacccctatccgccttgcgatgtgccag

SEQ ID NO: 768 - DNA, 41 bp, Artificial
  Synthetic oligonucleotide
gtaagtccccagggtggggctcgctctgggatagccctggc

SEQ ID NO: 769 - DNA, 60 bp, Artificial
  Synthetic oligonucleotide
atactgggttactttgactatgccttcacagccatctttactgttgagatcctgttgaag

SEQ ID NO: 770 - DNA, 107 bp, Artificial
  Synthetic oligonucleotide
atgacaacttttggagctttcctccacaaaggggccttctgcaggaactacttcaatttgctggatatgctggtggttggggtgtctctggtgtcatttgggattca

SEQ ID NO: 771 - DNA, 88 bp, Artificial
  Synthetic oligonucleotide
atccagtgccatctccgttgtgaagattctgagggtcttaagggtcctgcgtcccctcagggccatcaacagagcaaaaggacttaag

SEQ ID NO: 772 - DNA, 108 bp, Artificial
  Synthetic oligonucleotide
cacgtggtccagtgcgtcttcgtggccatccggaccatcggcaacatcatgatcgtcaccaccctcctgcagttcatgtttgcctgtatcggggtccagttgttcaag

SEQ ID NO: 773 - DNA, 53 bp, Artificial
  Synthetic oligonucleotide
gggaagttctatcgctgtacggatgaagccaaaagtaaccctgaagaatgcag

SEQ ID NO: 774 - DNA, 111 bp, Artificial
  Synthetic oligonucleotide
cactacgagcagtccaagatgttcaatgatgccatggacattctgaacatggtcttcaccggggtgttcaccgtcgagatggttttgaaagtcatcgcatttaagcctaag

SEQ ID NO: 775 - DNA, 43 bp, Artificial
  Synthetic oligonucleotide
gtgagttgcagaacccacttttcaaaggttgttgctgagtcac

SEQ ID NO: 776 - DNA, 84 bp, Artificial
  Synthetic oligonucleotide
gggtattttagtgacgcctggaacacgtttgactccctcatcgtaatcggcagcattatagacgtggccctcagcgaagcagac

SEQ ID NO: 777 - DNA, 31 bp, Artificial
  Synthetic oligonucleotide
cgtcgttgatattgctataactgaagtgaat

SEQ ID NO: 778 - DNA, 45 bp, Artificial
  Synthetic oligonucleotide
ccaactgaaagtgaaaatgtccctgtcccaactgctacacctggg

SEQ ID NO: 779 - DNA, 66 bp, Artificial
  Synthetic oligonucleotide
gcgctcccgtatgtggccctcctcatagccatgctgttcttcatctatgcggtcattggcatgcag

SEQ ID NO: 780 - DNA, 92 bp, Artificial
  Synthetic oligonucleotide
atgtttgggaaagttgccatgagagataacaaccagatcaataggaacaataacttccagacgtttccccaggcggtgctgctgctcttcag

SEQ ID NO: 781 - DNA, 97 bp, Artificial
  Synthetic oligonucleotide
gggaaggataaaacaccttgatgtggtcactctgcttcgacgcatccagcctcccctggggtttgggaagttatgtccacacagggtagcgtgcaag

SEQ ID NO: 782 - DNA, 103 bp, Artificial
  Synthetic oligonucleotide
agattagttgccatgaacatgcctctcaacagtgacgggacagtcatgtttaatgcaaccctgtttgctttggttcgaacggctcttaagatcaagaccgaag

SEQ ID NO: 783 - DNA, 102 bp, Artificial
  Synthetic oligonucleotide
ggaacctggagcaagctaatgaagaacttcgggctgtgataaagaaaatttggaagaaaaccagcatgaaattacttgaccaagttgtccctccagctggtg

SEQ ID NO: 784 - DNA, 77 bp, Artificial
  Synthetic oligonucleotide
gtcagtgcagtctatttcctaagtagtccttggccagtgctttggttttaatgctagtgtctccagaaagtccagag

SEQ ID NO: 785 - DNA, 117 bp, Artificial
  Synthetic oligonucleotide
gcgggattaaggacactgcatgacattgggccagaaatccggcgtgctatatcgtgtgatttgcaagatgacgagcctgaggaaacaaaacgagaagaagaagatgatgtgttcaaa

SEQ ID NO: 786 - DNA, 27 bp, Artificial
  Synthetic oligonucleotide
aacccgctattatgaaacttacattag

SEQ ID NO: 787 - DNA, 72 bp, Artificial
  Synthetic oligonucleotide
gtgaggccagattttttgttttgggtggaacctcccggggaacagtgtacctctcccccaacccccgctctg

SEQ ID NO: 788 - DNA, 99 bp, Artificial
  Synthetic oligonucleotide
ctgcgtcctggttcctgtttagctgttctgaaatacggtgtgtaagtaagtcagaacccagctaccagtgattattgcgagggcaatgggacctcataa

SEQ ID NO: 789 - DNA, 70 bp, Artificial
  Synthetic oligonucleotide
ttcctagtatgtctgctttaagcctggttcaacctctcatcgaatattaaatttttctttgtaagaaaaa

SEQ ID NO: 790 - protein, 2161 aa, Homo sapiens [sequence omitted]

SEQ ID NO: 791 - protein, 2161 aa, Homo sapiens
MMMMMMMKKMQHQRQQQADHANEANYARGTRLPLSGEGPTSQPNSSKQTVLSWQAAIDAARQAKAAQTMSTSAPPPVGSLSQRKRQQYAKSKKQGNSSNSRPARALFCLSLNNPIRRACISIVEWKPFDIFILLAIFANCVALAIYIPFPEDDSNSTNHNLEKVEYAFLIIFTVETFLKIIAYGLLLHPNAYVRNGWNLLDFVIVIVGLFSVILEQLTKETEGGNHSSGKSGGFDVKALRAFRVLRPLRLVSGVPSLQVVLNSIIKAMVPLLHIALLVLFVIIIYAIIGLELFIGKMHKTCFFADSDIVAEEDPAPCAFSGNGRQCTANGTECRSGWVGPNGGITNFDNFAFAMLTVFQCITMEGWTDVLYWMNDAMGFELPWVYFVSLVIFGSFFVLNLVLGVLSGEFSKEREKAKARGDFQKLREKQQLEEDLKGYLDWITQAEDIDPENEEEGGEEGKRNTSMPTSETESVNTENVSGEGENRGCCGSLCQAISKSKLSRRWRRWNRFNRRRCRAAVKSVTFYWLVIVLVFLNTLTISSEHYNQPDWLTQIQDIANKVLLALFTCEMLVKMYSLGLQAYFVSLFNRFDCFVVCGGITETILVELEIMSPLGISVFRCVRLLRIFKVTRHWTSLSNLVASLLNSMKSIASLLLLLFLFIIIFSLLGMQLFGGKFNFDETQTKRSTFDNFPQALLTVFQILTGEDWNAVMYDGIMAYGGPSSSGMIVCIYFIILFICGNYILLNVFLAIAVDNLADAESLNTAQKEEAEEKERKKIARKESLENKKNNKPEVNQIANSDNKVTIDDYREEDEDKDPYPPCDVPVGEEEEEEEEDEPEVPAGPRPRRISELNMKEKIAPIPEGSAFFILSKTNPIRVGCHKLINHHIFTNLILVFIMLSSAALAAEDPIRSHSFRNTILGYFDYAFTAIFTVEILLKMTTFGAFLHKGAFCRNYFNLLDMLVVGVSLVSFGIQSSAISVVKILRVLRVLRPLRAINRAKGLKHVVQCVFVAIRTIGNIMIVTTLLQFMFACIGVQLFKGKFYRCTDEAKSNPEECRGLFILYKDGDVDSPVVRERIWQNSDFNFDNVLSAMMALFTVSTFEGWPALLYKAIDSNGENIGPIYNHRVEISIFFIIYIIIVAFFMMNIFVGFVIVTFQEQGEKEYKNCELDKNQRQCVEYALKARPLRRYIPKNPYQYKFWYVVNSSPFEYMMFVLIMLNTLCLAMQHYEQSKMFNDAMDILNMVFTGVFTVEMVLKVIAFKPKGYFSDAWNTFDSLIVIGSIIDVALSEADPTESENVPVPTATPGNSEESNRISITFFRLFRVMRLVKLLSRGEGIRTLLWTFIKSFQALPYVALLIAMLFFIYAVIGMQMFGKVAMRDNNQINRNNNFQTFPQAVLLLFRCATGEAWQEIMLACLPGKLCDPESDYNPGEEYTCGSNFAIVYFISFYMLCAFLIINLFVAVIMDNFDYLTRDWSILGPHHLDEFKRIWSEYDPEAKGRIKHLDVVTLLRRIQPPLGFGKLCPHRVACKRLVAMNMPLNSDGTVMFNATLFALVRTALKIKTEGNLEQANEELRAVIKKIWKKTSMKLLDQVVPPAGDDEVTVGKFYATFLIQDYFRKFKKRKEQGLVGKYPAKNTTIALQAGLRTLHDIGPEIRRAISCDLQDDEPEETKREEEDDVFKRNGALLGNHVNHVNSDRRDSLQQTNTTHRPLHVQRPSIPPASDTEKPLFPPAGNSVCHNHHNHNSIGKQVPTSTNANLNNANMSKAAHGKRPSIGNLEHVSENGHHSSHKHDREPQRRSSVKRTRYYETYIRSDSGDEQLPTICREDPEIHGYFRDPHCLGEQEYFSSEECYEDDSSPTWSRQNYGYYSRYPGRNIDSERPRGYHHPQGFLEDDDSPVCYDSRRSPRRRLLPPTPASHRRSSFNFECLRRQSSQEEVPSSPIFPHRTALPLHLMQQQIMAVAGLDSSKAQKYSPSHSTRSWATPPATPPYRDWTPCYTPLIQVEQSEALDQVNGSLPSLHRSSWYTDEPDISYRTFTPASLTVPSSFRNKNSDKQRSADSLVEAVLISEGLGRYARDPKFVSATKHEIADACDLTIDEMESAASTLLNGNVRPRANGDVGPLSHRQDYELQDFGPGYSDEEPDPGRDEEDLADEMICITTL

SEQ ID NO: 792 - protein, 2181 aa, Homo sapiens
MMMMMMMKKMQHQRQQQADHANEANYARGTRLPLSGEGPTSQPNSSKQTVLSWQAAIDAARQAKAAQTMSTSAPPPVGSLSQRKRQQYAKSKKQGNSSNSRPARALFCLSLNNPIRRACISIVEWKPFDIFILLAIFANCVALAIYIPFPEDDSNSTNHNLEKVEYAFLIIFTVETFLKIIAYGLLLHPNAYVRNGWNLLDFVIVIVGLFSVILEQLTKETEGGNHSSGKSGGFDVKALRAFRVLRPLRLVSGVPSLQVVLNSIIKAMVPLLHIALLVLFVIIIYAIIGLELFIGKMHKTCFFADSDIVAEEDPAPCAFSGNGRQCTANGTECRSGWVGPNGGITNFDNFAFAMLTVFQCITMEGWTDVLYWVNDAIGWEWPWVYFVSLIILGSFFVLNLVLGVLSGEFSKEREKAKARGDFQKLREKQQLEEDLKGYLDWITQAEDIDPENEEEGGEEGKRNTSMPTSETESVNTENVSGEGENRGCCGSLWCWWRRRGAAKAGPSGCRRWGQAISKSKLSRRWRRWNRFNRRRCRAAVKSVTFYWLVIVLVFLNTLTISSEHYNQPDWLTQIQDIANKVLLALFTCEMLVKMYSLGLQAYFVSLFNRFDCFVVCGGITETILVELEIMSPLGISVFRCVRLLRIFKVTRHWTSLSNLVASLLNSMKSIASLLLLLFLFIIIFSLLGMQLFGGKFNFDETQTKRSTFDNFPQALLTVFQILTGEDWNAVMYDGIMAYGGPSSSGMIVCIYFIILFICGNYILLNVFLAIAVDNLADAESLNTAQKEEAEEKERKKIARKESLENKKNNKPEVNQIANSDNKVTIDDYREEDEDKDPYPPCDVPVGEEEEEEEEDEPEVPAGPRPRRISELNMKEKIAPIPEGSAFFILSKTNPIRVGCHKLINHHIFTNLILVFIMLSSAALAAEDPIRSHSFRNTILGYFDYAFTAIFTVEILLKMTTFGAFLHKGAFCRNYFNLLDMLVVGVSLVSFGIQSSAISVVKILRVLRVLRPLRAINRAKGLKHVVQCVFVAIRTIGNIMIVTTLLQFMFACIGVQLFKGKFYRCTDEAKSNPEECRGLFILYKDGDVDSPVVRERIWQNSDFNFDNVLSAMMALFTVSTFEGWPALLYKAIDSNGENIGPIYNHRVEISIFFIIYIIIVAFFMMNIFVGFVIVTFQEQGEKEYKNCELDKNQRQCVEYALKARPLRRYIPKNPYQYKFWYVVNSSPFEYMMFVLIMLNTLCLAMQHYEQSKMFNDAMDILNMVFTGVFTVEMVLKVIAFKPKGYFSDAWNTFDSLIVIGSIIDVALSEADPTESENVPVPTATPGNSEESNRISITFFRLFRVMRLVKLLSRGEGIRTLLWTFIKSFQALPYVALLIAMLFFIYAVIGMQMFGKVAMRDNNQINRNNNFQTFPQAVLLLFRCATGEAWQEIMLACLPGKLCDPESDYNPGEEYTCGSNFAIVYFISFYMLCAFLIINLFVAVIMDNFDYLTRDWSILGPHHLDEFKRIWSEYDPEAKGRIKHLDVVTLLRRIQPPLGFGKLCPHRVACKRLVAMNMPLNSDGTVMFNATLFALVRTALKIKTEGNLEQANEELRAVIKKIWKKTSMKLLDQVVPPAGDDEVTVGKFYATFLIQDYFRKFKKRKEQGLVGKYPAKNTTIALQAGLRTLHDIGPEIRRAISCDLQDDEPEETKREEEDDVFKRNGALLGNHVNHVNSDRRDSLQQTNTTHRPLHVQRPSIPPASDTEKPLFPPAGNSVCHNHHNHNSIGKQVPTSTNANLNNANMSKAAHGKRPSIGNLEHVSENGHHSSHKHDREPQRRSSVKRTRYYETYIRSDSGDEQLPTICREDPEIHGYFRDPHCLGEQEYFSSEECYEDDSSPTWSRQNYGYYSRYPGRNIDSERPRGYHHPQGFLEDDDSPVCYDSRRSPRRRLLPPTPASHRRSSFNFECLRRQSSQEEVPSSPIFPHRTALPLHLMQQQIMAVAGLDSSKAQKYSPSHSTRSWATPPATPPYRDWTPCYTPLIQVEQSEALDQVNGSLPSLHRSSWYTDEPDISYRTFTPASLTVPSSFRNKNSDKQRSADSLVEAVLISEGLGRYARDPKFVSATKHEIADACDLTIDEMESAASTLLNGNVRPRANGDVGPLSHRQDYELQDFGPGYSDEEPDPGRDEEDLADEMICITTL

SEQ ID NO: 793 - protein, 1882 aa, Homo sapiens
MMMMMMMKKMQHQRQQQADHANEANYARGTRLPLSGEGPTSQPNSSKQTVLSWQAAIDAARQAKAAQTMSTSAPPPVGSLSQRKRQQYAKSKKQGNSSNSRPARALFCLSLNNPIRRACISIVEWKPFDIFILLAIFANCVALAIYIPFPEDDSNSTNHNLEKVEYAFLIIFTVETFLKIIAYGLLLHPNAYVRNGWNLLDFVIVIVGLFSVILEQLTKETEGGNHSSGKSGGFDVKALRAFRVLRPLRLVSGVPSLQVVLNSIIKAMVPLLHIALLVLFVIIIYAIIGLELFIGKMHKTCFFADSDIVAEEDPAPCAFSGNGRQCTANGTECRSGWVGPNGGITNFDNFAFAMLTVFQCITMEGWTDVLYWVNDAIGWEWPWVYFVSLIILGSFFVLNLVLGVLSGEFSKEREKAKARGDFQKLREKQQLEEDLKGYLDWITQAEDIDPENEEEGGEEGKRNTSMPTSETESVNTENVSGEGENRGCCGSLWCWWRRRGAAKAGPSGCRRWGQAISKSKLSRRWRRWNRFNRRRCRAAVKSVTFYWLVIVLVFLNTLTISSEHYNQPDWLTQIQDIANKVLLALFTCEMLVKMYSLGLQAYFVSLFNRFDCFVVCGGITETILVELEIMSPLGISVFRCVRLLRIFKVTRHWTSLSNLVASLLNSMKSIASLLLLLFLFIIIFSLLGMQLFGGKFNFDETQTKRSTFDNFPQALLTVFQILTGEDWNAVMYDGIMAYGGPSSSGMIVCIYFIILFICGNYILLNVFLAIAVDNLADAESLNTAQKEEAEEKERKKIARKESLENKKNNKPEVNQIANSDNKVTIDDYREEDEDKDPYPPCDVPVGEEEEEEEEDEPEVPAGPRPRRISELNMKEKIAPIPEGSAFFILSKTNPIRVGCHKLINHHIFTNLILVFIMLSSAALAAEDPIRSHSFRNTILGYFDYAFTAIFTVEILLKMTTFGAFLHKGAFCRNYFNLLDMLVVGVSLVSFGIQSSAISVVKILRVLRVLRPLRAINRAKGLKHVVQCVFVAIRTIGNIMIVTTLLQFMFACIGVQLFKGKFYRCTDEAKSNPEECRGLFILYKDGDVDSPVVRERIWQNSDFNFDNVLSAMMALFTVSTFEGWPALLYKAIDSNGENIGPIYNHRVEISIFFIIYIIIVAFFMMNIFVGFVIVTFQEQGEKEYKNCELDKNQRQCVEYALKARPLRRYIPKNPYQYKFWYVVNSSPFEYMMFVLIMLNTLCLAMQHYEQSKMFNDAMDILNMVFTGVFTVEMVLKVIAFKPKGYFSDAWNTFDSLIVIGSIIDVALSEADPTESENVPVPTATPGNSEESNRISITFFRLFRVMRLVKLLSRGEGIRTLLWTFIKSFQALPYVALLIAMLFFIYAVIGMQMFGKVAMRDNNQINRNNNFQTFPQAVLLLFRCATGEAWQEIMLACLPGKLCDPESDYNPGEEYTCGSNFAIVYFISFYMLCAFLIINLFVAVIMDNFDYLTRDWSILGPHHLDEFKRIWSEYDPEAKGRIKHLDVVTLLRRIQPPLGFGKLCPHRVACKRLVAMNMPLNSDGTVMFNATLFALVRTALKIKTEGNLEQANEELRAVIKKIWKKTSMKLLDQVVPPAGDDEVTVGKFYATFLIQDYFRKFKKRKEQGLVGKYPAKNTTIALQAGLRTLHDIGPEIRRAISCDLQDDEPEETKREEEDDVFKRNGALLGNHVNHVNSDRRDSLQQTNTTHRPLHVQRPSIPPASDTEKPLFPPAGNSVCHNHHNHNSIGKQVPTSTNANLNNANMSKAAHGKRPSIGNLEHVSENGHHSSHKHDREPQRRSSVKRTRYYETYIRSDSGDEQLPTICREDPEIHGYFRDPHCLGEQEYFSSEECYEDDSSPTWSR

SEQ ID NO: 794 - protein, 2172 aa, Homo sapiens
MMMMMMMKKMQHQRQQQADHANEANYARGTRLPLSGEGPTSQPNSSKQTVLSWQAAIDAARQAKAAQTMSTSAPPPVGSLSQRKRQQYAKSKKQGNSSNSRPARALFCLSLNNPIRRACISIVEWKPFDIFILLAIFANCVALAIYIPFPEDDSNSTNHNLEKVEYAFLIIFTVETFLKIIAYGLLLHPNAYVRNGWNLLDFVIVIVGLFSVILEQLTKETEGGNHSSGKSGGFDVKALRAFRVLRPLRLVSGVPSLQVVLNSIIKAMVPLLHIALLVLFVIIIYAIIGLELFIGKMHKTCFFADSDIVAEEDPAPCAFSGNGRQCTANGTECRSGWVGPNGGITNFDNFAFAMLTVFQCITMEGWTDVLYWVNDAIGWEWPWVYFVSLIILGSFFVLNLVLGVLSGEFSKEREKAKARGDFQKLREKQQLEEDLKGYLDWITQAEDIDPENEEEGGEEGKRNTSMPTSETESVNTENVSGEGENRGCCGSLWCWWRRRGAAKAGPSGCRRWGQAISKSKLSRRWRRWNRFNRRRCRAAVKSVTFYWLVIVLVFLNTLTISSEHYNQPDWLTQIQDIANKVLLALFTCEMLVKMYSLGLQAYFVSLFNRFDCFVVCGGITETILVELEIMSPLGISVFRCVRLLRIFKVTRHWTSLSNLVASLLNSMKSIASLLLLLFLFIIIFSLLGMQLFGGKFNFDETQTKRSTFDNFPQALLTVFQILTGEDWNAVMYDGIMAYGGPSSSGMIVCIYFIILFICGNYILLNVFLAIAVDNLADAESLNTAQKEEAEEKERKKIARKESLENKKNNKPEVNQIANSDNKVTIDDYREEDEDKDPYPPCDVPVGEEEEEEEEDEPEVPAGPRPRRISELNMKEKIAPIPEGSAFFILSKTNPIRVGCHKLINHHIFTNLILVFIMLSSAALAAEDPIRSHSFRNTILGYFDYAFTAIFTVEILLKMTTFGAFLHKGAFCRNYFNLLDMLVVGVSLVSFGIQSSAISVVKILRVLRVLRPLRAINRAKGLKHVVQCVFVAIRTIGNIMIVTTLLQFMFACIGVQLFKGKFYRCTDEAKSNPEECRGLFILYKDGDVDSPVVRERIWQNSDFNFDNVLSAMMALFTVSTFEGWPALLYKAIDSNGENIGPIYNHRVEISIFFIIYIIIVAFFMMNIFVGFVIVTFQEQGEKEYKNCELDKNQRQCVEYALKARPLRRYIPKNPYQYKFWYVVNSSPFEYMMFVLIMLNTLCLAMQHYEQSKMFNDAMDILNMVFTGVFTVEMVLKVIAFKPKGYFSDAWNTFDSLIVIGSIIDVALSEADPTESENVPVPTATPGNSEESNRISITFFRLFRVMRLVKLLSRGEGIRTLLWTFIKSFQALPYVALLIAMLFFIYAVIGMQMFGKVAMRDNNQINRNNNFQTFPQAVLLLFRCATGEAWQEIMLACLPGKLCDPESDYNPGEEYTCGSNFAIVYFISFYMLCAFLIINLFVAVIMDNFDYLTRDWSILGPHHLDEFKRIWSEYDPEAKGRIKHLDVVTLLRRIQPPLGFGKLCPHRVACKRLVAMNMPLNSDGTVMFNATLFALVRTALKIKTEGNLEQANEELRAVIKKIWKKTSMKLLDQVVPPAGDDEVTVGKFYATFLIQDYFRKFKKRKEQGLVGKYPAKNTTIALQAGLRTLHDIGPEIRRAISCDLQDDEPEETKREEEDDVFKRNGALLGNHVNHVNSDRRDSLQQTNTTHRPLHVQRPSIPPASDTEKPLFPPAGNSVCHNHHNHNSIGKQVPTSTNANLNNANMSKAAHGKRPSIGNLEHVSENGHHSSHKHDREPQRRSSVKRSDSGDEQLPTICREDPEIHGYFRDPHCLGEQEYFSSEECYEDDSSPTWSRQNYGYYSRYPGRNIDSERPRGYHHPQGFLEDDDSPVCYDSRRSPRRRLLPPTPASHRRSSFNFECLRRQSSQEEVPSSPIFPHRTALPLHLMQQQIMAVAGLDSSKAQKYSPSHSTRSWATPPATPPYRDWTPCYTPLIQVEQSEALDQVNGSLPSLHRSSWYTDEPDISYRTFTPASLTVPSSFRNKNSDKQRSADSLVEAVLISEGLGRYARDPKFVSATKHEIADACDLTIDEMESAASTLLNGNVRPRANGDVGPLSHRQDYELQDFGPGYSDEEPDPGRDEEDLADEMICITTL

SEQ ID NO: 795 - protein, 2161 aa, Homo sapiens; identical to SEQ ID NO: 791

SEQ ID NO: 796 - protein, 1716 aa, Homo sapiens
MPTSETESVNTENVSGEGENRGCCGSLWCWWRRRGAAKAGPSGCRRWGQAISKSKLSRRWRRWNRFNRRRCRAAVKSVTFYWLVIVLVFLNTLTISSEHYNQPDWLTQIQDIANKVLLALFTCEMLVKMYSLGLQAYFVSLFNRFDCFVVCGGITETILVELEIMSPLGISVFRCVRLLRIFKVTRHWTSLSNLVASLLNSMKSIASLLLLLFLFIIIFSLLGMQLFGGKFNFDETQTKRSTFDNFPQALLTVFQILTGEDWNAVMYDGIMAYGGPSSSGMIVCIYFIILFICGNYILLNVFLAIAVDNLADAESLNTAQKEEAEEKERKKIARKESLENKKNNKPEVNQIANSDNKVTIDDYREEDEDKDPYPPCDVPVGEEEEEEEEDEPEVPAGPRPRRISELNMKEKIAPIPEGSAFFILSKTNPIRVGCHKLINHHIFTNLILVFIMLSSAALAAEDPIRSHSFRNTILGYFDYAFTAIFTVEILLKMTTFGAFLHKGAFCRNYFNLLDMLVVGVSLVSFGIQSSAISVVKILRVLRVLRPLRAINRAKGLKHVVQCVFVAIRTIGNIMIVTTLLQFMFACIGVQLFKGKFYRCTDEAKSNPEECRGLFILYKDGDVDSPVVRERIWQNSDFNFDNVLSAMMALFTVSTFEGWPALLYKAIDSNGENIGPIYNHRVEISIFFIIYIIIVAFFMMNIFVGFVIVTFQEQGEKEYKNCELDKNQRQCVEYALKARPLRRYIPKNPYQYKFWYVVNSSPFEYMMFVLIMLNTLCLAMQHYEQSKMFNDAMDILNMVFTGVFTVEMVLKVIAFKPKGYFSDAWNTFDSLIVIGSIIDVALSEADPTESENVPVPTATPGNSEESNRISITFFRLFRVMRLVKLLSRGEGIRTLLWTFIKSFQALPYVALLIAMLFFIYAVIGMQMFGKVAMRDNNQINRNNNFQTFPQAVLLLFRCATGEAWQEIMLACLPGKLCDPESDYNPGEEYTCGSNFAIVYFISFYMLCAFLIINLFVAVIMDNFDYLTRDWSILGPHHLDEFKRIWSEYDPEAKGRIKHLDVVTLLRRIQPPLGFGKLCPHRVACKRLVAMNMPLNSDGTVMFNATLFALVRTALKIKTEGNLEQANEELRAVIKKIWKKTSMKLLDQVVPPAGDDEVTVGKFYATFLIQDYFRKFKKRKEQGLVGKYPAKNTTIALQAGLRTLHDIGPEIRRAISCDLQDDEPEETKREEEDDVFKRNGALLGNHVNHVNSDRRDSLQQTNTTHRPLHVQRPSIPPASDTEKPLFPPAGNSVCHNHHNHNSIGKQVPTSTNANLNNANMSKAAHGKRPSIGNLEHVSENGHHSSHKHDREPQRRSSVKRTRYYETYIRSDSGDEQLPTICREDPEIHGYFRDPHCLGEQEYFSSEECYEDDSSPTWSRQNYGYYSRYPGRNIDSERPRGYHHPQGFLEDDDSPVCYDSRRSPRRRLLPPTPASHRRSSFNFECLRRQSSQEEVPSSPIFPHRTALPLHLMQQQIMAVAGLDSSKAQKYSPSHSTRSWATPPATPPYRDWTPCYTPLIQVEQSEALDQVNGSLPSLHRSSWYTDEPDISYRTFTPASLTVPSSFRNKNSDKQRSADSLVEAVLISEGLGRYARDPKFVSATKHEIADACDLTIDEMESAASTLLNGNVRPRANGDVGPLSHRQDYELQDFGPGYSDEEPDPGRDEEDLADEMICITTL

SEQ ID NO: 797 - protein, 1951 aa, Homo sapiens
MMMMMMMKKMQHQRQQQADHANEANYARGTRLPLSGEGPTSQPNSSKQTVLSWQAAIDAARQAKAAQTMSTSAPPPVGSLSQRKRQQYAKSKKQGNSSNSRPARALFCLSLNNPIRRACISIVEWKPFDIFILLAIFANCVALAIYIPFPEDDSNSTNHNLEKVEYAFLIIFTVETFLKIIAYGLLLHPNAYVRNGWNLLDFVIVIVGLFSVILEQLTKETEGGNHSSGKSGGFDVKALRAFRVLRPLRLVSGVPSLQVVLNSIIKAMVPLLHIALLVLFVIIIYAIIGLELFIGKMHKTCFFADSDIVAEEDPAPCAFSGNGRQCTANGTECRSGWVGPNGGITNFDNFAFAMLTVFQCITMEGWTDVLYWVNDAIGWEWPWVYFVSLIILGSFFVLNLVLGVLSGEFSKEREKAKARGDFQKLREKQQLEEDLKGYLDWITQAEDIDPENEEEGGEEGKRNTSMPTSETESVNTENVSGEGENRGCCGSLWCWWRRRGAAKAGPSGCRRWGQAISKSKLSRRWRRWNRFNRRRCRAAVKSVTFYWLVIVLVFLNTLTISSEHYNQPDWLTQIQDIANKVLLALFTCEMLVKMYSLGLQAYFVSLFNRFDCFVVCGGITETILVELEIMSPLGISVFRCVRLLRIFKVTRHWTSLSNLVASLLNSMKSIASLLLLLFLFIIIFSLLGMQLFGGKFNFDETQTKRSTFDNFPQALLTVFQILTGEDWNAVMYDGIMAYGGPSSSGMIVCIYFIILFICGNYILLNVFLAIAVDNLADAESLNTAQKEEAEEKERKKIARKESLENKKNNKPEVNQIANSDNKVTIDDYREEDEDKDPYPPCDVPVGEEEEEEEEDEPEVPAGPRPRRISELNMKEKIAPIPEGSAFFILSKTNPIRVGCHKLINHHIFTNLILVFIMLSSAALAAEDPIRSHSFRNTILGYFDYAFTAIFTVEILLKMTTFGAFLHKGAFCRNYFNLLDMLVVGVSLVSFGIQSSAISVVKILRVLRVLRPLRAINRAKGLKHVVQCVFVAIRTIGNIMIVTTLLQFMFACIGVQLFKGKFYRCTDEAKSNPEECRGLFILYKDGDVDSPVVRERIWQNSDFNFDNVLSAMMALFTVSTFEGWPALLYKAIDSNGENIGPIYNHRVEISIFFIIYIIIVAFFMMNIFVGFVIVTFQEQGEKEYKNCELDKNQRQCVEYALKARPLRRYIPKNPYQYKFWYVVNSSPFEYMMFVLIMLNTLCLAMQHYEQSKMFNDAMDILNMVFTGVFTVEMVLKVIAFKPKGYFSDAWNTFDSLIVIGSIIDVALSEADPTESENVPVPTATPGNSEESNRISITFFRLFRVMRLVKLLSRGEGIRTLLWTFIKSFQALPYVALLIAMLFFIYAVIGMQMFGKVAMRDNNQINRNNNFQTFPQAVLLLFRCATGEAWQEIMLACLPGKLCDPESDYNPGEEYTCGSNFAIVYFISFYMLCAFLIINLFVAVIMDNFDYLTRDWSILGPHHLDEFKRIWSEYDPEAKGRIKHLDVVTLLRRIQPPLGFGKLCPHRVACKRLVAMNMPLNSDGTVMFNATLFALVRTALKIKTEGNLEQANEELRAVIKKIWKKTSMKLLDQVVPPAGDDEVTVGKFYATFLIQDYFRKFKKRKEQGLVGKYPAKNTTIALQAGLRTLHDIGPEIRRAISCDLQDDEPEETKREEEDDVFKRNGALLGNHVNHVNSDRRDSLQQTNTTHRPLHVQRPSIPPASDTEKPLFPPAGNSVCHNHHNHNSIGKQVPTSTNANLNNANMSKAAHGKRPSIGNLEHVSENGHHSSHKHDREPQRRSSVKRSDSGDEQLPTICREDPEIHGYFRDPHCLGEQEYFSSEECYEDDSSPTWSRQNYGYYSRYPGRNIDSERPRGYHHPQGFLEDDDSPVCYDSRRSPRRRLLPPTPACEARFFVLGGTSRGTVYLSPNPRS

SEQ ID NO: 798 - protein, 1625 aa, Homo sapiens
MMMMMMMKKMQHQRQQQADHANEANYARGTRLPLSGEGPTSQPNSSKQTVLSWQAAIDAARQAKAAQTMSTSAPPPVGSLSQRKRQQYAKSKKQGNSSNSRPARALFCLSLNNPIRRACISIVEWKPFDIFILLAIFANCVALAIYIPFPEDDSNSTNHNLEKVEYAFLIIFTVETFLKIIAYGLLLHPNAYVRNGWNLLDFVIVIVGLFSVILEQLTKETEGGNHSSGKSGGFDVKALRAFRVLRPLRLVSGVPSLQVVLNSIIKAMVPLLHIALLVLFVIIIYAIIGLELFIGKMHKTCFFADSDIVAEEDPAPCAFSGNGRQCTANGTECRSGWVGPNGGITNFDNFAFAMLTVFQCITMEGWTDVLYWVNDAIGWEWPWVYFVSLIILGSFFVLNLVLGVLSGEFSKEREKAKARGDFQKLREKQQLEEDLKGYLDWITQAEDIDPENEEEGGEEGKRNTSMPTSETESVNTENVSGEGENRGCCGSLWCWWRRRGAAKAGPSGCRRWGQAISKSKLSRRWRRWNRFNRRRCRAAVKSVTFYWLVIVLVFLNTLTISSEHYNQPDWLTQIQDIANKVLLALFTCEMLVKMYSLGLQAYFVSLFNRFDCFVVCGGITETILVELEIMSPLGISVFRCVRLLRIFKVTRHWTSLSNLVASLLNSMKSIASLLLLLFLFIIIFSLLGMQLFGGKFNFDETQTKRSTFDNFPQALLTVFQILTGEDWNAVMYDGIMAYGGPSSSGMIVCIYFIILFICGNYILLNVFLAIAVDNLADAESLNTAQKEEAEEKERKKIARKESLENKKNNKPEVNQIANSDNKVTIDDYREEDEDKDPYPPCDVPVGEEEEEEEEDEPEVPAGPRPRRISELNMKEKIAPIPEGSAFFILSKTNPIRVGCHKLINHHIFTNLILVFIMLSSAALAAEDPIRSHSFRNTILGYFDYAFTAIFTVEILLKMTTFGAFLHKGAFCRNYFNLLDMLVVGVSLVSFGIQSSAISVVKILRVLRVLRPLRAINRAKGLKHVVQCVFVAIRTIGNIMIVTTLLQFMFACIGVQLFKGKFYRCTDEAKSNPEECRGLFILYKDGDVDSPVVRERIWQNSDFNFDNVLSAMMALFTVSTFEGWPALLYKAIDSNGENIGPIYNHRVEISIFFIIYIIIVAFFMMNIFVGFVIVTFQEQGEKEYKNCELDKNQRQCVEYALKARPLRRYIPKNPYQYKFWYVVNSSPFEYMMFVLIMLNTLCLAMQHYEQSKMFNDAMDILNMVFTGVFTVEMVLKVIAFKPKGYFSDAWNTFDSLIVIGSIIDVALSEADPTESENVPVPTATPGNSEESNRISITFFRLFRVMRLVKLLSRGEGIRTLLWTFIKSFQALPYVALLIAMLFFIYAVIGMQMFGKVAMRDNNQINRNNNFQTFPQAVLLLFRCATGEAWQEIMLACLPGKLCDPESDYNPGEEYTCGSNFAIVYFISFYMLCAFLIINLFVAVIMDNFDYLTRDWSILGPHHLDEFKRIWSEYDPEAKGRIKHLDVVTLLRRIQPPLGFGKLCPHRVACKRLVAMNMPLNSDGTVMFNATLFALVRTALKIKTEGNLEQANEELRAVIKKIWKKTSMKLLDQVVPPAGGQCSLFPK

SEQ ID NO: 799 - protein, 1296 aa, Homo sapiens
MMMMMMMKKMQHQRQQQADHANEANYARGTRLPLSGEGPTSQPNSSKQTVLSWQAAIDAARQAKAAQTMSTSAPPPVGSLSQRKRQQYAKSKKQGNSSNSRPARALFCLSLNNPIRRACISIVEWKPFDIFILLAIFANCVALAIYIPFPEDDSNSTNHNLEKVEYAFLIIFTVETFLKIIAYGLLLHPNAYVRNGWNLLDFVIVIVGLFSVILEQLTKETEGGNHSSGKSGGFDVKALRAFRVLRPLRLVSGVPSLQVVLNSIIKAMVPLLHIALLVLFVIIIYAIIGLELFIGKMHKTCFFADSDIVAEEDPAPCAFSGNGRQCTANGTECRSGWVGPNGGITNFDNFAFAMLTVFQCITMEGWTDVLYWVNDAIGWEWPWVYFVSLIILGSFFVLNLVLGVLSGEFSKEREKAKARGDFQKLREKQQLEEDLKGYLDWITQAEDIDPENEEEGGEEGKRNTSMPTSETESVNTENVSGEGENRGCCGSLWCWWRRRGAAKAGPSGCRRWGQAISKSKLSRRWRRWNRFNRRRCRAAVKSVTFYWLVIVLVFLNTLTISSEHYNQPDWLTQIQDIANKVLLALFTCEMLVKMYSLGLQAYFVSLFNRFDCFVVCGGITETILVELEIMSPLGISVFRCVRLLRIFKVTRHWTSLSNLVASLLNSMKSIASLLLLLFLFIIIFSLLGMQLFGGKFNFDETQTKRSTFDNFPQALLTVFQILTGEDWNAVMYDGIMAYGGPSSSGMIVCIYFIILFICGNYILLNVFLAIAVDNLADAESLNTAQKEEAEEKERKKIARKESLENKKNNKPEVNQIANSDNKVTIDDYREEDEDKDPYPPCDVPVGEEEEEEEEDEPEVPAGPRPRRISELNMKEKIAPIPEGSAFFILSKTNPIRVGCHKLINHHIFTNLILVFIMLSSAALAAEDPIRSHSFRNTILGYFDYAFTAIFTVEILLKMTTFGAFLHKGAFCRNYFNLLDMLVVGVSLVSFGIQSSAISVVKILRVLRVLRPLRAINRAKGLKHVVQCVFVAIRTIGNIMIVTTLLQFMFACIGVQLFKGKFYRCTDEAKSNPEECRGLFILYKDGDVDSPVVRERIWQNSDFNFDNVLSAMMALFTVSTFEGWPALLYKAIDSNGENIGPIYNHRVEISIFFIIYIIIVAFFMMNIFVGFVIVTFQEQGEKEYKNCELDKNQRQCVEYALKARPLRRYIPKNPYQYKFWYVVNSSPFEYMMFVLIMLNTLCLAMQHYEQSKMFNDAMDILNMVFTGVFTVEMVLKVIAFKPKVSCRTHFSKVVAES

SEQ ID NO: 800 - protein, 950 aa, Homo sapiens
MMMMMMMKKMQHQRQQQADHANEANYARGTRLPLSGEGPTSQPNSSKQTVLSWQAAIDAARQAKAAQTMSTSAPPPVGSLSQRKRQQYAKSKKQGNSSNSRPARALFCLSLNNPIRRACISIVEWKPFDIFILLAIFANCVALAIYIPFPEDDSNSTNHNLEKVEYAFLIIFTVETFLKIIAYGLLLHPNAYVRNGWNLLDFVIVIVGLFSVILEQLTKETEGGNHSSGKSGGFDVKALRAFRVLRPLRLVSGVPSLQVVLNSIIKAMVPLLHIALLVLFVIIIYAIIGLELFIGKMHKTCFFADSDIVAEEDPAPCAFSGNGRQCTANGTECRSGWVGPNGGITNFDNFAFAMLTVFQCITMEGWTDVLYWVNDAIGWEWPWVYFVSLIILGSFFVLNLVLGVLSGEFSKEREKAKARGDFQKLREKQQLEEDLKGYLDWITQAEDIDPENEEEGGEEGKRNTSMPTSETESVNTENVSGEGENRGCCGSLWCWWRRRGAAKAGPSGCRRWGQAISKSKLSRRWRRWNRFNRRRCRAAVKSVTFYWLVIVLVFLNTLTISSEHYNQPDWLTQIQDIANKVLLALFTCEMLVKMYSLGLQAYFVSLFNRFDCFVVCGGITETILVELEIMSPLGISVFRCVRLLRIFKVTRHWTSLSNLVASLLNSMKSIASLLLLLFLFIIIFSLLGMQLFGGKFNFDETQTKRSTFDNFPQALLTVFQILTGEDWNAVMYDGIMAYGGPSSSGMIVCIYFIILFICGNYILLNVFLAIAVDNLADAESLNTAQKEEAEEKERKKIARKESLENKKNNKPEVNQIANSDNKVTIDDYREEDEDKDPYPPCDVPVGEEEEEEEEDEPEVPAGPRPRRISELNMKEKIAPIPEGSAFFILSKTNPIRVGCHKLINHHIFTNLILVFIMLSSAALAAEDPIRSHSFRNTVSPQGGARSGIAL

SEQ ID NO: 801 - protein, 881 aa, Homo sapiens
VVDIAITEVNPTESENVPVPTATPGNSEESNRISITFFRLFRVMRLVKLLSRGEGIRTLLWTFIKSFQALPYVALLIAMLFFIYAVIGMQMFGKVAMRDNNQINRNNNFQTFPQAVLLLFRCATGEAWQEIMLACLPGKLCDPESDYNPGEEYTCGSNFAIVYFISFYMLCAFLIINLFVAVIMDNFDYLTRDWSILGPHHLDEFKRIWSEYDPEAKGRIKHLDVVTLLRRIQPPLGFGKLCPHRVACKRLVAMNMPLNSDGTVMFNATLFALVRTALKIKTEGNLEQANEELRAVIKKIWKKTSMKLLDQVVPPAGDDEVTVGKFYATFLIQDYFRKFKKRKEQGLVGKYPAKNTTIALQAGLRTLHDIGPEIRRAISCDLQDDEPEETKREEEDDVFKRNGALLGNHVNHVNSDRRDSLQQTNTTHRPLHVQRPSIPPASDTEKPLFPPAGNSVCHNHHNHNSIGKQVPTSTNANLNNANMSKAAHGKRPSIGNLEHVSENGHHSSHKHDREPQRRSSVKRTRYYETYIRSDSGDEQLPTICREDPEIHGYFRDPHCLGEQEYFSSEECYEDDSSPTWSRQNYGYYSRYPGRNIDSERPRGYHHPQGFLEDDDSPVCYDSRRSPRRRLLPPTPASHRRSSFNFECLRRQSSQEEVPSSPIFPHRTALPLHLMQQQIMAVAGLDSSKAQKYSPSHSTRSWATPPATPPYRDWTPCYTPLIQVEQSEALDQVNGSLPSLHRSSWYTDEPDISYRTFTPASLTVPSSFRNKNSDKQRSADSLVEAVLISEGLGRYARDPKFVSATKHEIADACDLTIDEMESAASTLLNGNVRPRANGDVGPLSHRQDYELQDFGPGYSDEEPDPGRDEEDLADEMICITTL

SEQ ID NO: 802 - protein, 611 aa, Homo sapiens
MLRPRCLLRRTAHPPHSAPAPAPARSKCLGSWSNVLIRESSVWSLRLDDEVTVGKFYATFLIQDYFRKFKKRKEQGLVGKYPAKNTTIALQAGLRTLHDIGPEIRRAISCDLQDDEPEETKREEEDDVFKRNGALLGNHVNHVNSDRRDSLQQTNTTHRPLHVQRPSIPPASDTEKPLFPPAGNSVCHNHHNHNSIGKQVPTSTNANLNNANMSKAAHGKRPSIGNLEHVSENGHHSSHKHDREPQRRSSVKRTRYYETYIRSDSGDEQLPTICREDPEIHGYFRDPHCLGEQEYFSSEECYEDDSSPTWSRQNYGYYSRYPGRNIDSERPRGYHHPQGFLEDDDSPVCYDSRRSPRRRLLPPTPASHRRSSFNFECLRRQSSQEEVPSSPIFPHRTALPLHLMQQQIMAVAGLDSSKAQKYSPSHSTRSWATPPATPPYRDWTPCYTPLIQVEQSEALDQVNGSLPSLHRSSWYTDEPDISYRTFTPASLTVPSSFRNKNSDKQRSADSLVEAVLISEGLGRYARDPKFVSATKHEIADACDLTIDEMESAASTLLNGNVRPRANGDVGPLSHRQDYELQDFGPGYSDEEPDPGRDEEDLADEMICITTL

SEQ ID NO: 803 - protein, 399 aa, Homo sapiens
MSKAAHGKRPSIGNLEHVSENGHHSSHKHDREPQRRSSVKRTRYYETYIRSDSGDEQLPTICREDPEIHGYFRDPHCLGEQEYFSSEECYEDDSSPTWSRQNYGYYSRYPGRNIDSERPRGYHHPQGFLEDDDSPVCYDSRRSPRRRLLPPTPASHRRSSFNFECLRRQSSQEEVPSSPIFPHRTALPLHLMQQQIMAVAGLDSSKAQKYSPSHSTRSWATPPATPPYRDWTPCYTPLIQVEQSEALDQVNGSLPSLHRSSWYTDEPDISYRTFTPASLTVPSSFRNKNSDKQRSADSLVEAVLISEGLGRYARDPKFVSATKHEIADACDLTIDEMESAASTLLNGNVRPRANGDVGPLSHRQDYELQDFGPGYSDEEPDPGRDEEDLADEMICITTL

SEQ ID NO: 804 - protein, 407 aa, Homo sapiens
MMMMMMMKKMQHQRQQQADHANEANYARGTRLPLSGEGPTSQPNSSKQTVLSWQAAIDAARQAKAAQTMSTSAPPPVGSLSQRKRQQYAKSKKQGNSSNSRPARALFCLSLNNPIRRACISIVEWKPFDIFILLAIFANCVALAIYIPFPEDDSNSTNHNLEKVEYAFLIIFTVETFLKIIAYGLLLHPNAYVRNGWNLLDFVIVIVGLFSVILEQLTKETEGGNHSSGKSGGFDVKALRAFRVLRPLRLVSGVPSLQVVLNSIIKAMVPLLHIALLVLFVIIIYAIIGLELFIGKMHKTCFFADSDIVAEEDPAPCAFSGNGRQCTANGTECRSGWVGPNGGITNFDNFAFAMLTVFQCITMEGWTDVLYWVNDAIGWEWPWVYFVSLIILGSFFVLNLVLGVLSG

SEQ ID NO: 805 - protein, 413 aa, Homo sapiens
MMMMMMMKKMQHQRQQQADHANEANYARGTRLPLSGEGPTSQPNSSKQTVLSWQAAIDAARQAKAAQTMSTSAPPPVGSLSQRKRQQYAKSKKQGNSSNSRPARALFCLSLNNPIRRACISIVEWKPFDIFILLAIFANCVALAIYIPFPEDDSNSTNHNLEKVEYAFLIIFTVETFLKIIAYGLLLHPNAYVRNGWNLLDFVIVIVGLFSVILEQLTKETEGGNHSSGKSGGFDVKALRAFRVLRPLRLVSGVPSLQVVLNSIIKAMVPLLHIALLVLFVIIIYAIIGLELFIGKMHKTCFFADSDIVAEEDPAPCAFSGNGRQCTANGTECRSGWVGPNGGITNFDNFAFAMLTVFQCITMEGWTDVLYWMNDAMGFELPWVYFVSLVIFGSFFVLNLVLGVLSGHGGSRL

SEQ ID NO: 806 - DNA, 3897 bp, Homo sapiens
ctcagggcagagggaggaaggacagcagaccagacagtcacagcagccttgacaaaacgttcctggaactcaagctcttctccacagaggaggacagagcagacagcagagaccatggagtctccctcggcccctccccacagatggtgcatcccctggcagaggctcctgctcacagcctcacttctaaccttctggaacccgcccaccactgccaagctcactattgaatccacgccgttcaatgtcgcagaggggaaggaggtgcttctacttgtccacaatctgccccagcatctttttggctacagctggtacaaaggtgaaagagtggatggcaaccgtcaaattataggatatgtaataggaactcaacaagctaccccagggcccgcatacagtggtcgagagataatataccccaatgcatccctgctgatccagaacatcatccagaatgacacaggattctacaccctacacgtcataaagtcagatcttgtgaatgaagaagcaactggccagttccgggtatacccggagctgcccaagccctccatctccagcaacaactccaaacccgtggaggacaaggatgctgtggccttcacctgtgaacctgagactcaggacgcaacctacctgtggtgggtaaacaatcagagcctcccggtcagtcccaggctgcagctgtccaatggcaacaggaccctcactctattcaatgtcacaagaaatgacacagcaagctacaaatgtgaaacccagaacccagtgagtgccaggcgcagtgattcagtcatcctgaatgtcctctgtgagtatatctgctcctctctggcccaggctgccagcccaaatccacagggccagaggcaggatttctcagtccctctcaggttcaagtacacagaccctcaaccctggacatccagactgtctgtgactttctgccccagaaaaacctgggcagaccaagtcttgaccaagaataggaggggaggggctgcttctgtcctgggaggctcagggtccacaccctatgatgggagaaacaggtgaatatctcagactcaggctcagtagatacaagaggggtttggctgagactttaggattgtgattcagcttagagggacactgtggtccttccatagaccaggaacttccacttccctctgacaatatcacctgtggctttattttgtttgctccagatggcccggatgcccccaccatttcccctctaaacacatcttacagatcaggggaaaatctgaacctctcctgccacgcagcctctaacccacctgcacagtactcttggtttgtcaatgggactttccagcaatccacccaagagctctttatccccaacatcactgtgaataatagtggatcctatacgtgccaagcccataactcagacactggcctcaataggaccacagtcacgacgatcacagtctatgcagagccacccaaacccttcatcaccagcaacaactccaaccccgtggaggatgaggatgctgtagccttaacctgtgaacctgagattcagaacacaacctacctgtggtgggtaaataatcagagcctcccggtcagtcccaggctgcagctgtccaatgacaacaggaccctcactctactcagtgtcacaaggaatgatgtaggaccctatgagtgtggaatccagaacgaattaagtgttgaccacagcgacccagtcatcctgaatgtcctctatggcccagacgaccccaccatttccccctcatacacctattaccgtccaggggtgaacctcagcctctcctgccatgcagcctctaacccacctgcacagtattcttggctgattgatgggaacatccagcaacacacacaagagctctttatctccaacatcactgagaagaacagcggactctatacctgccaggccaataactcagccagtggccacagcaggactacagtcaagacaatcacagtctctgcggagctgcccaagccctccatctccagcaacaactccaaacccgtggaggacaaggatgctgtggccttcacctgtgaacctgaggctcagaacacaacctacctgtggtgggtaaatggtcagagcctcccagtcagtcccaggctgcagctgtccaatggcaacaggaccctcactctattcaatgtcacaagaaatgacgcaagagcctatgtatgtggaatccagaactcagtgagtgcaaaccgcagtgacccagtcaccctggatgtcctctatgggccggacacccccatcatttcccccccagactcgtcttacctttcgggagcgaacctcaacctctcctgccactcggcctctaacccatccccgcagtattcttggcgtatcaatgggataccgcagcaacacacacaagttctctttatcgccaaaatcacgccaaataataacgggacctatgcctgttttgtctctaacttggctactggccgcaataattccatagtcaagagcatcacagtctctgcatctggaacttctcctggtctctcagctggggccactgtcggcatcatgattggagtgctggttggggttgctctgatatagcagccctggtgtagtttcttcatttcaggaagactgacagttgttttgcttcttccttaaagcatttgcaacagctacagtctaaaattgcttctttaccaaggatatttacagaaaagactctgaccagagatcgagaccatcctagccaacatcgtgaaaccccatctctactaaaaatacaaaaatgagctgggcttggtggcgcgcacctgtagtcccagttactcgggaggctgaggcaggagaatcgcttgaacccgggaggtggagattgcagtgagcccagatcgcaccactgcactccagtctggcaacagagcaagactccatctcaaaaagaaaagaaaagaagactctgacctgtactcttgaatacaagtttctgataccactgcactgtctgagaatttccaaaactttaatgaactaactgacagcttcatgaaactgtccaccaagatcaagcagagaaaataattaatttcatgggactaaatgaactaatgaggataatattttcataattttttatttgaaattttgctgattctttaaatgtcttgtttcccagatttcaggaaactttttttcttttaagctatccacagcttacagcaatttgataaaatatacttttgtgaacaaaaattgagacatttacattttctccctatgtggtcgctccagacttgggaaactattcatgaatatttatattgtatggtaatatagttattgcacaagttcaataaaaatctgctctttgtataacagaatacatttgaaaacattggttatattaccaagactttgactagaatgtcgtatttgaggatataaacccataggtaataaacccacaggtactacaaacaaagtctgaagtcagccttggtttggcttcctagtgtcaattaaacttctaaaagtttaatctgagattccttataaaaacttccagcaaagcaactttaaaaaagtctgtgtgggccgggcgcggtggctcacgcctgtaatcccagcactttgatccgccgaggcgggcggatcacgaggtcaggagatccagaccatcctggctaacacagtgaaaccccgtctctactaaaaatacaaaaaaagttagccgggcgtggtggtgggggcctgtagtcccagctactcaggaggctgaggcaggagaacggcatgaacccgggaggcagggcttgcagtgagccaagatcatgccgctgcactccagcctgggagacaaagtgagactccgtcaa

SEQ ID NO: 807 - DNA, 3347 bp, Homo sapiens
ctcagggcagagggaggaaggacagcagaccagacagtcacagcagccttgacaaaacgttcctggaactcaagctcttctccacagaggaggacagagcagacagcagagaccatggagtctccctcggcccctccccacagatggtgcatcccctggcagaggctcctgctcacagcctcacttctaaccttctggaacccgcccaccactgccaagctcactattgaatccacgccgttcaatgtcgcagaggggaaggaggtgcttctacttgtccacaatctgccccagcatctttttggctacagctggtacaaaggtgaaagagtggatggcaaccgtcaaattataggatatgtaataggaactcaacaagctaccccagggcccgcatacagtggtcgagagataatataccccaatgcatccctgctgatccagaacatcatccagaatgacacaggattctacaccctacacgtcataaagtcagatcttgtgaatgaagaagcaactggccagttccgggtatacccggagctgcccaagccctccatctccagcaacaactccaaacccgtggaggacaaggatgctgtggccttcacctgtgaacctgagactcaggacgcaacctacctgtggtgggtaaacaatcagagcctcccggtcagtcccaggctgcagctgtccaatggcaacaggaccctcactctattcaatgtcacaagaaatgacacagcaagctacaaatgtgaaacccagaacccagtgagtgccaggcgcagtgattcagtcatcctgaatgtcctctatggcccggatgcccccaccatttcccctctaaacacatcttacagatcaggggaaaatctgaacctctcctgccacgcagcctctaacccacctgcacagtactcttggtttgtcaatgggactttccagcaatccacccaagagctctttatccccaacatcactgtgaataatagtggatcctatacgtgccaagcccataactcagacactggcctcaataggaccacagtcacgacgatcacagtctatgcagagccacccaaacccttcatcaccagcaacaactccaaccccgtggaggatgaggatgctgtagccttaacctgtgaacctgagattcagaacacaacctacctgtggtgggtaaataatcagagcctcccggtcagtcccaggctgcagctgtccaatgacaacaggaccctcactctactcagtgtcacaaggaatgatgtaggaccctatgagtgtggaatccagaacgaattaagtgttgaccacagcgacccagtcatcctgaatgtcctctatggcccagacgaccccaccatttccccctcatacacctattaccgtccaggggtgaacctcagcctctcctgccatgcagcctctaacccacctgcacagtattcttggctgattgatgggaacatccagcaacacacacaagagctctttatctccaacatcactgagaagaacagcggactctatacctgccaggccaataactcagccagtggccacagcaggactacagtcaagacaatcacagtctctgcggagctgcccaagccctccatctccagcaacaactccaaacccgtggaggacaaggatgctgtggccttcacctgtgaacctgaggctcagaacacaacctacctgtggtgggtaaatggtcagagcctcccagtcagtcccaggctgcagctgtccaatggcaacaggaccctcactctattcaatgtcacaagaaatgacgcaagagcctatgtatgtggaatccagaactcagtgagtgcaaaccgcagtgacccagtcaccctggatgtcctctatgggccggacacccccatcatttcccccccagactcgtcttacctttcgggagcgaacctcaacctctcctgccactcggcctctaacccatccccgcagtattcttggcgtatcaatgggataccgcagcaacacacacaagttctctttatcgccaaaatcacgccaaataataacgggacctatgcctgttttgtctctaacttggctactggccgcaataattccatagtcaagagcatcacagtctctggtaagtggctccctggagcatcagcatcatattctggggtggagtctatctggttctcaccaaagagccaagaagacattttctttcccagtctgtgttccatgggcacaaggaaatcccaaattctatcctgagccccctcactccatctcggccaactctctcctccccggcttctctgatatctcacggctgacctcgggtccagcctggaatgtggggaggggcctcccttagccccagaaggcccccaatagtgaaagggacttcatagtccagaagaaagaagggtccttaaggtcgagttgctcctctctatcaccaatatgtccctttctgtcacctctttgtgttttttcacctactctgtgagctacaaggaacaaggaggctttgaaaccagcccacactttttccccaaatgagaggaggaagccccttggatgaggcaggagcagctcagactctgctccctgctctgcgcccggctcacccggtgactggctctgccctggctccacttggggtgggaccggggcatgtggagaaggtgtccaggtggcctgttttgaatctgggtaaatcaagctgccaatccacagcagagcctcccttgggtcaggttgcagggaaatgggaaaagagggagcctcgggacagactcctgagctgtgtcctggctctgaagtcactggctgtatgaggctgtggacacagcacataggacacagcagaggaaagtgagtgacacacacttggagaaatagggagattcagccataggggctctgcatgggagggaacaggcagtgccaaaaagtgtgtgtttatagagagggtaagactatcagccactatatatatctaacataaaacttaccattaaccatttctaagtgtacaattaagtgaaacagcataaatatcaatcaagtatattgcccggtgtggtggctcatccctgtaatcccagcactttgggaggccaaggcgagtggatcacctgaggtcaggagttcaagatacagaaaaaaaaaaatagctaggcatggtggtgggtgcctgtaatcccagctactcgggaggctgaggcaggagaatcgctcgaacctgggcggtgtagtttgcagtgagccgagattgagccactgcactccagcctgggtgacagagtgagactacatcacaaaaaaaaaaaaaaaaaagg

SEQ ID NO: 808 - DNA, 3470 bp, Homo sapiens
ctcagggcagagggaggaaggacagcagaccagacagtcacagcagccttgacaaaacgttcctggaactcaagctcttctccacagaggaggacagagcagacagcagagaccatggagtctccctcggcccctccccacagatggtgcatcccctggcagaggctcctgctcacagcctcacttctaaccttctggaacccgcccaccactgccaagctcactattgaatccacgccgttcaatgtcgcagaggggaaggaggtgcttctacttgtccacaatctgccccagcatctttttggctacagctggtacaaaggtgaaagagtggatggcaaccgtcaaattataggatatgtaataggaactcaacaagctaccccagggcccgcatacagtggtcgagagataatataccccaatgcatccctgctgatccagaacatcatccagaatgacacaggattctacaccctacacgtcataaagtcagatcttgtgaatgaagaagcaactggccagttccgggtatacccggagctgcccaagccctccatctccagcaacaactccaaacccgtggaggacaaggatgctgtggccttcacctgtgaacctgagactcaggacgcaacctacctgtggtgggtaaacaatcagagcctcccggtcagtcccaggctgcagctgtccaatggcaacaggaccctcactctattcaatgtcacaagaaatgacacagcaagctacaaatgtgaaacccagaacccagtgagtgccaggcgcagtgattcagtcatcctgaatgtcctctatggcccggatgcccccaccatttcccctctaaacacatcttacagatcaggggaaaatctgaacctctcctgccacgcagcctctaacccacctgcacagtactcttggtttgtcaatgggactttccagcaatccacccaagagctctttatccccaacatcactgtgaataatagtggatcctatacgtgccaagcccataactcagacactggcctcaataggaccacagtcacgacgatcacagtctatgcagagccacccaaacccttcatcaccagcaacaactccaaccccgtggaggatgaggatgctgtagccttaacctgtgaacctgagattcagaacacaacctacctgtggtgggtaaataatcagagcctcccggtcagtcccaggctgcagctgtccaatgacaacaggaccctcactctactcagtgtcacaaggaatgatgtaggaccctatgagtgtggaatccagaacgaattaagtgttgaccacagcgacccagtcatcctgaatgtcctctatggcccagacgaccccaccatttccccctcatacacctattaccgtccaggggtgaacctcagcctctcctgccatgcagcctctaacccacctgcacagtattcttggctgattgatgggaacatccagcaacacacacaagagctctttatctccaacatcactgagaagaacagcggactctatacctgccaggccaataactcagccagtggccacagcaggactacagtcaagacaatcacagtctctgcggagctgcccaagccctccatctccagcaacaactccaaacccgtggaggacaaggatgctgtggccttcacctgtgaacctgaggctcagaacacaacctacctgtggtgggtaaatggtcagagcctcccagtcagtcccaggctgcagctgtccaatggcaacaggaccctcactctattcaatgtcacaagaaatgacgcaagagcctatgtatgtggaatccagaactcagtgagtgcaaaccgcagtgacccagtcaccctggatgtcctctatgggccggacacccccatcatttcccccccagactcgtcttacctttcgggagcgaacctcaacctctcctgccactcggcctctaacccatccccgcagtattcttggcgtatcaatgggataccgcagcaacacacacaagttctctttatcgccaaaatcacgccaaataataacgggacctatgcctgttttgtctctaacttggctactggccgcaataattccatagtcaagagcatcacagtctctgctggggccactgtcggcatcatgattggagtgctggttggggttgctctgatatagcagccctggtgtagtttcttcatttcaggaagactgacagttgttttgcttcttccttaaagcatttgcaacagctacagtctaaaattgcttctttaccaaggatatttacagaaaagactctgaccagagatcgagaccatcctagccaacatcgtgaaaccccatctctactaaaaatacaaaaatgagctgggcttggtggcgcgcacctgtagtcccagttactcgggaggctgaggcaggagaatcgcttgaacccgggaggtggagattgcagtgagcccagatcgcaccactgcactccagtctggcaacagagcaagactccatctcaaaaagaaaagaaaagaagactctgacctgtactcttgaatacaagtttctgataccactgcactgtctgagaatttccaaaactttaatgaactaactgacagcttcatgaaactgtccaccaagatcaagcagagaaaataattaatttcatgggactaaatgaactaatgaggataatattttcataattttttatttgaaattttgctgattctttaaatgtcttgtttcccagatttcaggaaactttttttcttttaagctatccacagcttacagcaatttgataaaatatacttttgtgaacaaaaattgagacatttacattttctccctatgtggtcgctccagacttgggaaactattcatgaatatttatattgtatggtaatatagttattgcacaagttcaataaaaatctgctctttgtataacagaatacatttgaaaacattggttatattaccaagactttgactagaatgtcgtatttgaggatataaacccataggtaataaacccacaggtactacaaacaaagtctgaagtcagccttggtttggcttcctagtgtcaattaaacttctaaaagtttaatctgagattccttataaaaacttccagcaaagcaactttaaaaaagtctgtgtgggccgggcgcggtggctcacgcctgtaatcccagcactttgatccgccgaggcgggcggatcacgaggtcaggagatccagaccatcctggctaacacagtgaaaccccgtctctactaaaaatacaaaaaaagttagccgggcgtggtggtgggggcctgtagtcccagctactcaggaggctgaggcaggagaacggcatgaacccgggaggcagggcttgcagtgagccaagatcatgccgctgcactccagcctgggagacaaagtgagactccgtcaa

SEQ ID NO: 809 - DNA, 4217 bp, Homo sapiens
tccaatgggagaaaataattgcaaaacttcttctcaaagttctgtctcataactgtcaaacacacatggtccttgagggccagatttccagcagttcatgctcccccttttccaccagtcagttctgcatttgcaaatgtccacatgtatttatggagagatccacagcatcctcgcctgccctctgcaaggggagaagggacattaaagaccaaagacaggccgggtgcagtggctcatgcttgtaatcccagcactttgggaggccaaggtgggcagaacacctgaggtcagaagttcaagaccagcctgaccaatatggtgaaaccccatctctactaaaaatacaaaatttagctgggtgtggtggtgggcgcctgtagtcccagctactcgggaggctgagacaggagaatcgcttgaacccgggaggcagaggttgccatgagccgagatcgtgcctggccaacacagcaagactccatctcaaaaaacaaacaaacaaacaaagaccaaagacaaagaacatacatatggttctgctgttaaatccgggcagctcctgcctgtcacctgaagttctagatcattccctggactccactctatctttaggggtctctggctcaagtcagtcatcatcaaacacctgggaaaaactgccccaccttgtgcctccactgcctaacgactgagctgacctccaggcttgcctctggtgtcccctgtgttatttctactgaaacatccagtcccaggccaggctgcacaatatgtacagggtttaaggacaatgggaagacccatcactatccatttctaggatgtccttgcaaagggaaaccacagaaaaaatatacctagggaaacaaagtaggactgaaggtggaagggacccagcacttgaatgttccaggtgaggaccctacagtgggccaagtagtcaactggtcagggagggaccaggagaggcaccaggagctgtgacctcccccccagtcctgtgtctgttcacagcccaatgctgctgcttaattcacacttgagaaagtctgtgcttcccccacaccgagcaggcagcctcgcagtctctgagatctcagatcatcgtgcatctgtcttgtgacacatgcacccaccgtgggtttttaagggctcaggtgggctgagaggtggaaggtgccaactctgattgaaagatgcctgtgaggaatcaaaggtgccacacagggcaatcttctctctgttatctgcacagcggagctgcccaagccctccatctccagcaacaactccaaacccgtggaggacaaggatgctgtggccttcacctgtgaacctgagactcaggacgcaacctacctgtggtgggtaaacaatcagagcctcccggtcagtcccaggctgcagctgtccaatggcaacaggaccctcactctattcaatgtcacaagaaatgacacagcaagctacaaatgtgaaacccagaacccagtgagtgccaggcgcagtgattcagtcatcctgaatgtcctctatggcccggatgcccccaccatttcccctctaaacacatcttacagatcaggggaaaatctgaacctctcctgccacgcagcctctaacccacctgcacagtactcttggtttgtcaatgggactttccagcaatccacccaagagctctttatccccaacatcactgtgaataatagtggatcctatacgtgccaagcccataactcagacactggcctcaataggaccacagtcacgacgatcacagtctatgcagagccacccaaacccttcatcaccagcaacaactccaaccccgtggaggatgaggatgctgtagccttaacctgtgaacctgagattcagaacacaacctacctgtggtgggtaaataatcagagcctcccggtcagtcccaggctgcagctgtccaatgacaacaggaccctcactctactcagtgtcacaaggaatgatgtaggaccctatgagtgtggaatccagaacgaattaagtgttgaccacagcgacccagtcatcctgaatgtcctctatggcccagacgaccccaccatttccccctcatacacctattaccgtccaggggtgaacctcagcctctcctgccatgcagcctctaacccacctgcacagtattcttggctgattgatgggaacatccagcaacacacacaagagctctttatctccaacatcactgagaagaacagcggactctatacctgccaggccaataactcagccagtggccacagcaggactacagtcaagacaatcacagtctctgcggagctgcccaagccctccatctccagcaacaactccaaacccgtggaggacaaggatgctgtggccttcacctgtgaacctgaggctcagaacacaacctacctgtggtgggtaaatggtcagagcctcccagtcagtcccaggctgcagctgtccaatggcaacaggaccctcactctattcaatgtcacaagaaatgacgcaagagcctatgtatgtggaatccagaactcagtgagtgcaaaccgcagtgacccagtcaccctggatgtcctctatgggccggacacccccatcatttcccccccagactcgtcttacctttcgggagcgaacctcaacctctcctgccactcggcctctaacccatccccgcagtattcttggcgtatcaatgggataccgcagcaacacacacaagttctctttatcgccaaaatcacgccaaataataacgggacctatgcctgttttgtctctaacttggctactggccgcaataattccatagtcaagagcatcacagtctctgcatctggaacttctcctggtctctcagctggggccactgtcggcatcatgattggagtgctggttggggttgctctgatatagcagccctggtgtagtttcttcatttcaggaagactgacagttgttttgcttcttccttaaagcatttgcaacagctacagtctaaaattgcttctttaccaaggatatttacagaaaagactctgaccagagatcgagaccatcctagccaacatcgtgaaaccccatctctactaaaaatacaaaaatgagctgggcttggtggcgcgcacctgtagtcccagttactcgggaggctgaggcaggagaatcgcttgaacccgggaggtggagattgcagtgagcccagatcgcaccactgcactccagtctggcaacagagcaagactccatctcaaaaagaaaagaaaagaagactctgacctgtactcttgaatacaagtttctgataccactgcactgtctgagaatttccaaaactttaatgaactaactgacagcttcatgaaactgtccaccaagatcaagcagagaaaataattaatttcatgggactaaatgaactaatgaggataatattttcataattttttatttgaaattttgctgattctttaaatgtcttgtttcccagatttcaggaaactttttttcttttaagctatccacagcttacagcaatttgataaaatatacttttgtgaacaaaaattgagacatttacattttctccctatgtggtcgctccagacttgggaaactattcatgaatatttatattgtatggtaatatagttattgcacaagttcaataaaaatctgctctttgtataacagaatacatttgaaaacattggttatattaccaagactttgactagaatgtcgtatttgaggatataaacccataggtaataaacccacaggtactacaaacaaagtctgaagtcagccttggtttggcttcctagtgtcaattaaacttctaaaagtttaatctgagattccttataaaaacttccagcaaagcaactttaaaaaagtctgtgtgggccgggcgcggtggctcacgcctgtaatcccagcactttgatccgccgaggcgggcggatcacgaggtcaggagatccagaccatcctggctaacacagtgaaaccccgtctctactaaaaatacaaaaaaagttagccgggcgtggtggtgggggcctgtagtcccagctactcaggaggctgaggcaggagaacggcatgaacccgggaggcagggcttgcagtgagccaagatcatgccgctgcactccagcctgggagacaaagtgagactccgtcaa

SEQ ID NO: 810 - DNA, 2963 bp, Homo sapiens
ctcagggcagagggaggaaggacagcagaccagacagtcacagcagccttgacaaaacgttcctggaactcaagctcttctccacagaggaggacagagcagacagcagagaccatggagtctccctcggcccctccccacagatggtgcatcccctggcagaggctcctgctcacagcctcacttctaaccttctggaacccgcccaccactgccaagctcactattgaatccacgccgttcaatgtcgcagaggggaaggaggtgcttctacttgtccacaatctgccccagcatctttttggctacagctggtacaaaggtgaaagagtggatggcaaccgtcaaattataggatatgtaataggaactcaacaagctaccccagggcccgcatacagtggtcgagagataatataccccaatgcatccctgctgatccagaacatcatccagaatgacacaggattctacaccctacacgtcataaagtcagatcttgtgaatgaagaagcaactggccagttccgggtatacccggagctgcccaagccctccatctccagcaacaactccaaacccgtggaggacaaggatgctgtggccttcacctgtgaacctgagactcaggacgcaacctacctgtggtgggtaaacaatcagagcctcccggtcagtcccaggctgcagctgtccaatggcaacaggaccctcactctattcaatgtcacaagaaatgacacagcaagctacaaatgtgaaacccagaacccagtgagtgccaggcgcagtgattcagtcatcctgaatgtcctctatggcccagacgaccccaccatttccccctcatacacctattaccgtccaggggtgaacctcagcctctcctgccatgcagcctctaacccacctgcacagtattcttggctgattgatgggaacatccagcaacacacacaagagctctttatctccaacatcactgagaagaacagcggactctatacctgccaggccaataactcagccagtggccacagcaggactacagtcaagacaatcacagtctctgcggagctgcccaagccctccatctccagcaacaactccaaacccgtggaggacaaggatgctgtggccttcacctgtgaacctgaggctcagaacacaacctacctgtggtgggtaaatggtcagagcctcccagtcagtcccaggctgcagctgtccaatggcaacaggaccctcactctattcaatgtcacaagaaatgacgcaagagcctatgtatgtggaatccagaactcagtgagtgcaaaccgcagtgacccagtcaccctggatgtcctctatgggccggacacccccatcatttcccccccagactcgtcttacctttcgggagcgaacctcaacctctcctgccactcggcctctaacccatccccgcagtattcttggcgtatcaatgggataccgcagcaacacacacaagttctctttatcgccaaaatcacgccaaataataacgggacctatgcctgttttgtctctaacttggctactggccgcaataattccatagtcaagagcatcacagtctctgcatctggaacttctcctggtctctcagctggggccactgtcggcatcatgattggagtgctggttggggttgctctgatatagcagccctggtgtagtttcttcatttcaggaagactgacagttgttttgcttcttccttaaagcatttgcaacagctacagtctaaaattgcttctttaccaaggatatttacagaaaagactctgaccagagatcgagaccatcctagccaacatcgtgaaaccccatctctactaaaaatacaaaaatgagctgggcttggtggcgcgcacctgtagtcccagttactcgggaggctgaggcaggagaatcgcttgaacccgggaggtggagattgcagtgagcccagatcgcaccactgcactccagtctggcaacagagcaagactccatctcaaaaagaaaagaaaagaagactctgacctgtactcttgaatacaagtttctgataccactgcactgtctgagaatttccaaaactttaatgaactaactgacagcttcatgaaactgtccaccaagatcaagcagagaaaataattaatttcatgggactaaatgaactaatgaggataatattttcataattttttatttgaaattttgctgattctttaaatgtcttgtttcccagatttcaggaaactttttttcttttaagctatccacagcttacagcaatttgataaaatatacttttgtgaacaaaaattgagacatttacattttctccctatgtggtcgctccagacttgggaaactattcatgaatatttatattgtatggtaatatagttattgcacaagttcaataaaaatctgctctttgtataacagaatacatttgaaaacattggttatattaccaagactttgactagaatgtcgtatttgaggatataaacccataggtaataaacccacaggtactacaaacaaagtctgaagtcagccttggtttggcttcctagtgtcaattaaacttctaaaagtttaatctgagattccttataaaaacttccagcaaagcaactttaaaaaagtctgtgtgggccgggcgcggtggctcacgcctgtaatcccagcactttgatccgccgaggcgggcggatcacgaggtcaggagatccagaccatcctggctaacacagtgaaaccccgtctctactaaaaatacaaaaaaagttagccgggcgtggtggtgggggcctgtagtcccagctactcaggaggctgaggcaggagaacggcatgaacccgggaggcagggcttgcagtgagccaagatcatgccgctgcactccagcctgggagacaaagtgagactccgtcaa

SEQ ID NO: 811 - DNA, 1886 bp, Homo sapiens
ctcagggcagagggaggaaggacagcagaccagacagtcacagcagccttgacaaaacgttcctggaactcaagctcttctccacagaggaggacagagcagacagcagagaccatggagtctccctcggcccctccccacagatggtgcatcccctggcagaggctcctgctcacagcctcacttctaaccttctggaacccgcccaccactgccaagctcactattgaatccacgccgttcaatgtcgcagaggggaaggaggtgcttctacttgtccacaatctgccccagcatctttttggctacagctggtacaaaggtgaaagagtggatggcaaccgtcaaattataggatatgtaataggaactcaacaagctaccccagggcccgcatacagtggtcgagagataatataccccaatgcatccctgctgatccagaacatcatccagaatgacacaggattctacaccctacacgtcataaagtcagatcttgtgaatgaagaagcaactggccagttccgggtatacccggagctgcccaagccctccatctccagcaacaactccaaacccgtggaggacaaggatgctgtggccttcacctgtgaacctgagactcaggacgcaacctacctgtggtgggtaaacaatcagagcctcccggtcagtcccaggctgcagctgtccaatggcaacaggaccctcactctattcaatgtcacaagaaatgacacagcaagctacaaatgtgaaacccagaacccagtgagtgccaggcgcagtgattcagtcatcctgaatgtcctctatggcccggatgcccccaccatttcccctctaaacacatcttacagatcaggggaaaatctgaacctctcctgccacgcagcctctaacccacctgcacagtactcttggtttgtcaatgggactttccagcaatccacccaagagctctttatccccaacatcactgtgaataatagtggatcctatacgtgccaagcccataactcagacactggcctcaataggaccacagtcacgacgatcacagtctatgcagagccacccaaacccttcatcaccagcaacaactccaaccccgtggaggatgaggatgctgtagccttaacctgtgaacctgagattcagaacacaacctacctgtggtgggtaaataatcagagcctcccggtcagtcccaggctgcagctgtccaatgacaacaggaccctcactctactcagtgtcacaaggaatgatgtaggaccctatgagtgtggaatccagaacgaattaagtgttgaccacagcgacccagtcatcctgaatgtcctctatggcccagacgaccccaccatttccccctcatacacctattaccgtccaggggtgaacctcagcctctcctgccatgcagcctctaacccacctgcacagtattcttggctgattgatgggaacatccagcaacacacacaagagctctttatctccaacatcactgagaagaacagcggactctatacctgccaggccaataactcagccagtggccacagcaggactacagtcaagacaatcacagtctctgcggagctgcccaagccctccatctccagcaacaactccaaccccgtggaggacaaggatgctgtggccttcacctgtgaacctgaggttcagaacacaacctacctgtggtgggtaaatggtcagagcctcccggtcagtcccaggctgcagctgtccaatggcaacatgaccctcactctactcagctgtcaaaaggaacgatgcaggatcctatgaatgtgaaatacagaacccagcgagtgccaaccgcagtgacccagtcaccctgaatgtcctct

SEQ ID NO: 812 - DNA, 2429 bp, Homo sapiens
ctcagggcagagggaggaaggacagcagaccagacagtcacagcagccttgacaaaacgttcctggaactcaagctcttctccacagaggaggacagagcagacagcagagaccatggagtctccctcggcccctccccacagatggtgcatcccctggcagaggctcctgctcacagcctcacttctaaccttctggaacccgcccaccactgccaagctcactattgaatccacgccgttcaatgtcgcagaggggaaggaggtgcttctacttgtccacaatctgccccagcatctttttggctacagctggtacaaaggtgaaagagtggatggcaaccgtcaaattataggatatgtaataggaactcaacaagctaccccagggcccgcatacagtggtcgagagataatataccccaatgcatccctgctgatccagaacatcatccagaatgacacaggattctacaccctacacgtcataaagtcagatcttgtgaatgaagaagcaactggccagttccgggtatacccggagctgcccaagccctccatctccagcaacaactccaaacccgtggaggacaaggatgctgtggccttcacctgtgaacctgagactcaggacgcaacctacctgtggtgggtaaacaatcagagcctcccggtcagtcccaggctgcagctgtccaatggcaacaggaccctcactctattcaatgtcacaagaaatgacacagcaagctacaaatgtgaaacccagaacccagtgagtgccaggcgcagtgattcagtcatcctgaatgtcctctatgggccggacacccccatcatttcccccccagactcgtcttacctttcgggagcgaacctcaacctctcctgccactcggcctctaacccatccccgcagtattcttggcgtatcaatgggataccgcagcaacacacacaagttctctttatcgccaaaatcacgccaaataataacgggacctatgcctgttttgtctctaacttggctactggccgcaataattccatagtcaagagcatcacagtctctgcatctggaacttctcctggtctctcagctggggccactgtcggcatcatgattggagtgctggttggggttgctctgatatagcagccctggtgtagtttcttcatttcaggaagactgacagttgttttgcttcttccttaaagcatttgcaacagctacagtctaaaattgcttctttaccaaggatatttacagaaaagactctgaccagagatcgagaccatcctagccaacatcgtgaaaccccatctctactaaaaatacaaaaatgagctgggcttggtggcgcgcacctgtagtcccagttactcgggaggctgaggcaggagaatcgcttgaacccgggaggtggagattgcagtgagcccagatcgcaccactgcactccagtctggcaacagagcaagactccatctcaaaaagaaaagaaaagaagactctgacctgtactcttgaatacaagtttctgataccactgcactgtctgagaatttccaaaactttaatgaactaactgacagcttcatgaaactgtccaccaagatcaagcagagaaaataattaatttcatgggactaaatgaactaatgaggataatattttcataattttttatttgaaattttgctgattctttaaatgtcttgtttcccagatttcaggaaactttttttcttttaagctatccacagcttacagcaatttgataaaatatacttttgtgaacaaaaattgagacatttacattttctccctatgtggtcgctccagacttgggaaactattcatgaatatttatattgtatggtaatatagttattgcacaagttcaataaaaatctgctctttgtataacagaatacatttgaaaacattggttatattaccaagactttgactagaatgtcgtatttgaggatataaacccataggtaataaacccacaggtactacaaacaaagtctgaagtcagccttggtttggcttcctagtgtcaattaaacttctaaaagtttaatctgagattccttataaaaacttccagcaaagcaactttaaaaaagtctgtgtgggccgggcgcggtggctcacgcctgtaatcccagcactttgatccgccgaggcgggcggatcacgaggtcaggagatccagaccatcctggctaacacagtgaaaccccgtctctactaaaaatacaaaaaaagttagccgggcgtggtggtgggggcctgtagtcccagctactcaggaggctgaggcaggagaacggcatgaacccgggaggcagggcttgcagtgagccaagatcatgccgctgcactccagcctgggagacaaagtgagactccgtcaa

SEQ ID NO: 813 - DNA, 2429 bp, Homo sapiens
ctcagggcagagggaggaaggacagcagaccagacagtcacagcagccttgacaaaacgttcctggaactcaagctcttctccacagaggaggacagagcagacagcagagaccatggagtctccctcggcccctccccacagatggtgcatcccctggcagaggctcctgctcacagcctcacttctaaccttctggaacccgcccaccactgccaagctcactattgaatccacgccgttcaatgtcgcagaggggaaggaggtgcttctacttgtccacaatctgccccagcatctttttggctacagctggtacaaaggtgaaagagtggatggcaaccgtcaaattataggatatgtaataggaactcaacaagctaccccagggcccgcatacagtggtcgagagataatataccccaatgcatccctgctgatccagaacatcatccagaatgacacaggattctacaccctacacgtcataaagtcagatcttgtgaatgaagaagcaactggccagttccgggtatacccggagctgcccaagccctccatctccagcaacaactccaaacccgtggaggacaaggatgctgtggccttcacctgtgaacctgaggctcagaacacaacctacctgtggtgggtaaatggtcagagcctcccagtcagtcccaggctgcagctgtccaatggcaacaggaccctcactctattcaatgtcacaagaaatgacgcaagagcctatgtatgtggaatccagaactcagtgagtgcaaaccgcagtgacccagtcaccctggatgtcctctatgggccggacacccccatcatttcccccccagactcgtcttacctttcgggagcgaacctcaacctctcctgccactcggcctctaacccatccccgcagtattcttggcgtatcaatgggataccgcagcaacacacacaagttctctttatcgccaaaatcacgccaaataataacgggacctatgcctgttttgtctctaacttggctactggccgcaataattccatagtcaagagcatcacagtctctgcatctggaacttctcctggtctctcagctggggccactgtcggcatcatgattggagtgctggttggggttgctctgatatagcagccctggtgtagtttcttcatttcaggaagactgacagttgttttgcttcttccttaaagcatttgcaacagctacagtctaaaattgcttctttaccaaggatatttacagaaaagactctgaccagagatcgagaccatcctagccaacatcgtgaaaccccatctctactaaaaatacaaaaatgagctgggcttggtggcgcgcacctgtagtcccagttactcgggaggctgaggcaggagaatcgcttgaacccgggaggtggagattgcagtgagcccagatcgcaccactgcactccagtctggcaacagagcaagactccatctcaaaaagaaaagaaaagaagactctgacctgtactcttgaatacaagtttctgataccactgcactgtctgagaatttccaaaactttaatgaactaactgacagcttcatgaaactgtccaccaagatcaagcagagaaaataattaatttcatgggactaaatgaactaatgaggataatattttcataattttttatttgaaattttgctgattctttaaatgtcttgtttcccagatttcaggaaactttttttcttttaagctatccacagcttacagcaatttgataaaatatacttttgtgaacaaaaattgagacatttacattttctccctatgtggtcgctccagacttgggaaactattcatgaatatttatattgtatggtaatatagttattgcacaagttcaataaaaatctgctctttgtataacagaatacatttgaaaacattggttatattaccaagactttgactagaatgtcgtatttgaggatataaacccataggtaataaacccacaggtactacaaacaaagtctgaagtcagccttggtttggcttcctagtgtcaattaaacttctaaaagtttaatctgagattccttataaaaacttccagcaaagcaactttaaaaaagtctgtgtgggccgggcgcggtggctcacgcctgtaatcccagcactttgatccgccgaggcgggcggatcacgaggtcaggagatccagaccatcctggctaacacagtgaaaccccgtctctactaaaaatacaaaaaaagttagccgggcgtggtggtgggggcctgtagtcccagctactcaggaggctgaggcaggagaacggcatgaacccgggaggcagggcttgcagtgagccaagatcatgccgctgcactccagcctgggagacaaagtgagactccgtcaa

SEQ ID NO: 814 - DNA, 1872 bp, Homo sapiens
ctaatgttttgtatttttaatacagacggggtttcaccatattggtcaggctggtcttgaactcctgacctcaggtgatccacactcctcggcctcccaaagtgctgggattacaggcgtgaaccaccacacccggccgatttggactttttaacacaggattgggacaggattcagagggacactgtggcccttctacaatcaggagcttcccctttcctctgatgacatcacctgtggctttgttctctttgttccagatgggccggacacccccatcatttcccccccagactcgtcttacctttcgggagcgaacctcaacctctcctgccactcggcctctaacccatccccgcagtattcttggcgtatcaatgggataccgcagcaacacacacaagttctctttatcgccaaaatcacgccaaataataacgggacctatgcctgttttgtctctaacttggctactggccgcaataattccatagtcaagagcatcacagtctctgcatctggaacttctcctggtctctcagctggggccactgtcggcatcatgattggagtgctggttggggttgctctgatatagcagccctggtgtagtttcttcatttcaggaagactgacagttgttttgcttcttccttaaagcatttgcaacagctacagtctaaaattgcttctttaccaaggatatttacagaaaagactctgaccagagatcgagaccatcctagccaacatcgtgaaaccccatctctactaaaaatacaaaaatgagctgggcttggtggcgcgcacctgtagtcccagttactcgggaggctgaggcaggagaatcgcttgaacccgggaggtggagattgcagtgagcccagatcgcaccactgcactccagtctggcaacagagcaagactccatctcaaaaagaaaagaaaagaagactctgacctgtactcttgaatacaagtttctgataccactgcactgtctgagaatttccaaaactttaatgaactaactgacagcttcatgaaactgtccaccaagatcaagcagagaaaataattaatttcatgggactaaatgaactaatgaggataatattttcataattttttatttgaaattttgctgattctttaaatgtcttgtttcccagatttcaggaaactttttttcttttaagctatccacagcttacagcaatttgataaaatatacttttgtgaacaaaaattgagacatttacattttctccctatgtggtcgctccagacttgggaaactattcatgaatatttatattgtatggtaatatagttattgcacaagttcaataaaaatctgctctttgtataacagaatacatttgaaaacattggttatattaccaagactttgactagaatgtcgtatttgaggatataaacccataggtaataaacccacaggtactacaaacaaagtctgaagtcagccttggtttggcttcctagtgtcaattaaacttctaaaagtttaatctgagattccttataaaaacttccagcaaagcaactttaaaaaagtctgtgtgggccgggcgcggtggctcacgcctgtaatcccagcactttgatccgccgaggcgggcggatcacgaggtcaggagatccagaccatcctggctaacacagtgaaaccccgtctctactaaaaatacaaaaaaagttagccgggcgtggtggtgggggcctgtagtcccagctactcaggaggctgaggcaggagaacggcatgaacccgggaggcagggcttgcagtgagccaagatcatgccgctgcactccagcctgggagacaaagtgagactccgtcaa

SEQ ID NO: 815 - DNA, 3125 bp, Homo sapiens
ggctcaagtgatcttctgccccagcctcttgagaagctgggactacagacatgtgacaccaagcctggatagttttttaaagaaattttgtagacactgtgtctgcctatgttgcccaggctggtcttgacctcctgacctcaagtaatcctcttgcttgagtctcccaatgtgctgggattaaatgtgtgagccgctatacctccattttcatttctgattttagtaatttgaatcttctctcttttttcttagtcaatctaataaatgattgtcaattttgttgatcttttttgaagaaccaacttttggtttcattgattccttctattgtttttcaattttccattttatttatttaaactctaatccttattatttccttcatgtactatcctgtggtttgaggtggttctttttctgtatcctgaagttgtaaagttaggttgttgatttgagatctctctttatatttaatgtatttaccattaaatttctcacacaagattcttaacttctctgagccttcaattcttcaactgaaaattgtaataattctcatcaccaggaaatggaggaaaaatgaaaattgcaataagaatgactgtttaacagtattgttttaaagatttaatgtaatattcgattaagctttcagcaaaatgctacacacagagggaaacttcataaatattggctcgagatcactactgttattattagcttgaagttaggcagttctagagccaaatcctagatccacttctcactaattatatgactttggataagttttttcaccactccaagtctctgtcatttcatctgtaagatggaaatcatgcctacccaacagggttattgtatggatcaaatgagatgccagaaaagcatttacagtagctaacatagcattaatcatcagcctgagttgactagtgagagccaagccccaaatgaaaacccactaggacatggttactggctaaaaatgggggagagaaaaaaaagttaagtgcaaagaatcaagcctggtatgttagttttcatccactgagattcagccaagatggaattagaggtgcaagataatttaccggggggaaccaccatgaggaaaagtggagtagaagtgggaggagcctgagagagccctcagaccacgatgcagatctgattcctgagaaggagaaagaggagagagttttagatagtgatgcagttctcagagtttccacaaggctggtggggcgtcctcaagcccctcacccatgagagagaagcagagtcccccagaactgggcttttcattcccctggtgggagcccatgagaagcgagttctctgtgcaacggacttagtaaatacagaatgcactagcctgggccttctgccaatcaagtccctgccacagagacccaacagacttatttatgcctaccacaactgagacactgagaaaaagatgcaaccatgaaaagatagaaagttctaatgacacgcaaaaatagcaatcagactttctcaaatttcaaagccttcagaaatagctgagtgcagacaggccagggtggaattgacagaagactgatcaccaactagcaacacagtgagagagaaaaaattgcaactttcccacaaaactaatgcattccttgaagcaacaagtagagactgcttcatgctgagagctggaacctggggcaccccactgtaaaataacatcacattcattccttctcttttctttccatgacggacgattcagcatctggaacttctcctggtctctcagctggggccactgtcggcatcatgattggagtgctggttggggttgctctgatatagcagccctggtgtagtttcttcatttcaggaagactgacagttgttttgcttcttccttaaagcatttgcaacagctacagtctaaaattgcttctttaccaaggatatttacagaaaagactctgaccagagatcgagaccatcctagccaacatcgtgaaaccccatctctactaaaaatacaaaaatgagctgggcttggtggcgcgcacctgtagtcccagttactcgggaggctgaggcaggagaatcgcttgaacccgggaggtggagattgcagtgagcccagatcgcaccactgcactccagtctggcaacagagcaagactccatctcaaaaagaaaagaaaagaagactctgacctgtactcttgaatacaagtttctgataccactgcactgtctgagaatttccaaaactttaatgaactaactgacagcttcatgaaactgtccaccaagatcaagcagagaaaataattaatttcatgggactaaatgaactaatgaggataatattttcataattttttatttgaaattttgctgattctttaaatgtcttgtttcccagatttcaggaaactttttttcttttaagctatccacagcttacagcaatttgataaaatatacttttgtgaacaaaaattgagacatttacattttctccctatgtggtcgctccagacttgggaaactattcatgaatatttatattgtatggtaatatagttattgcacaagttcaataaaaatctgctctttgtataacagaatacatttgaaaacattggttatattaccaagactttgactagaatgtcgtatttgaggatataaacccataggtaataaacccacaggtactacaaacaaagtctgaagtcagccttggtttggcttcctagtgtcaattaaacttctaaaagtttaatctgagattccttataaaaacttccagcaaagcaactttaaaaaagtctgtgtgggccgggcgcggtggctcacgcctgtaatcccagcactttgatccgccgaggcgggcggatcacgaggtcaggagatccagaccatcctggctaacacagtgaaaccccgtctctactaaaaatacaaaaaaagttagccgggcgtggtggtgggggcctgtagtcccagctactcaggaggctgaggcaggagaacggcatgaacccgggaggcagggcttgcagtgagccaagatcatgccgctgcactccagcctgggagacaaagtgagactccgtcaa

SEQ ID NO: 816 - DNA, 178 bp, Artificial
  Synthetic oligonucleotide
ctcagggcagagggaggaaggacagcagaccagacagtcacagcagccttgacaaaacgttcctggaactcaagctcttctccacagaggaggacagagcagacagcagagaccatggagtctccctcggcccctccccacagatggtgcatcccctggcagaggctcctgctcacag

SEQ ID NO: 817 - DNA, 278 bp, Artificial
  Synthetic oligonucleotide
cctcacttctaaccttctggaacccgcccaccactgccaagctcactattgaatccacgccgttcaatgtcgcagaggggaaggaggtgcttctacttgtccacaatctgccccagcatctttttggctacagctggtacaaaggtgaaagagtggatggcaaccgtcaaattataggatatgtaataggaactcaacaagctaccccagggcccgcatacagtggtcgagagataatataccccaatgcatccctgctgatccagaacatcatccag

SEQ ID NO: 818 - DNA, 1258 bp, Artificial
  Synthetic oligonucleotide
tccaatgggagaaaataattgcaaaacttcttctcaaagttctgtctcataactgtcaaacacacatggtccttgagggccagatttccagcagttcatgctcccccttttccaccagtcagttctgcatttgcaaatgtccacatgtatttatggagagatccacagcatcctcgcctgccctctgcaaggggagaagggacattaaagaccaaagacaggccgggtgcagtggctcatgcttgtaatcccagcactttgggaggccaaggtgggcagaacacctgaggtcagaagttcaagaccagcctgaccaatatggtgaaaccccatctctactaaaaatacaaaatttagctgggtgtggtggtgggcgcctgtagtcccagctactcgggaggctgagacaggagaatcgcttgaacccgggaggcagaggttgccatgagccgagatcgtgcctggccaacacagcaagactccatctcaaaaaacaaacaaacaaacaaagaccaaagacaaagaacatacatatggttctgctgttaaatccgggcagctcctgcctgtcacctgaagttctagatcattccctggactccactctatctttaggggtctctggctcaagtcagtcatcatcaaacacctgggaaaaactgccccaccttgtgcctccactgcctaacgactgagctgacctccaggcttgcctctggtgtcccctgtgttatttctactgaaacatccagtcccaggccaggctgcacaatatgtacagggtttaaggacaatgggaagacccatcactatccatttctaggatgtccttgcaaagggaaaccacagaaaaaatatacctagggaaacaaagtaggactgaaggtggaagggacccagcacttgaatgttccaggtgaggaccctacagtgggccaagtagtcaactggtcagggagggaccaggagaggcaccaggagctgtgacctcccccccagtcctgtgtctgttcacagcccaatgctgctgcttaattcacacttgagaaagtctgtgcttcccccacaccgagcaggcagcctcgcagtctctgagatctcagatcatcgtgcatctgtcttgtgacacatgcacccaccgtgggtttttaagggctcaggtgggctgagaggtggaaggtgccaactctgattgaaagatgcctgtgaggaatcaaaggtgccacacagggcaatcttctctctgttatctgcacag

SEQ ID NO: 819 - DNA, 400 bp, Artificial
  Synthetic oligonucleotide
gtgagtatatctgctcctctctggcccaggctgccagcccaaatccacagggccagaggcaggatttctcagtccctctcaggttcaagtacacagaccctcaaccctggacatccagactgtctgtgactttctgccccagaaaaacctgggcagaccaagtcttgaccaagaataggaggggaggggctgcttctgtcctgggaggctcagggtccacaccctatgatgggagaaacaggtgaatatctcagactcaggctcagtagatacaagaggggtttggctgagactttaggattgtgattcagcttagagggacactgtggtccttccatagaccaggaacttccacttccctctgacaatatcacctgtggctttattttgtttgctccag

SEQ ID NO: 820 - DNA, 255 bp, Artificial
  Synthetic oligonucleotide
atggcccggatgcccccaccatttcccctctaaacacatcttacagatcaggggaaaatctgaacctctcctgccacgcagcctctaacccacctgcacagtactcttggtttgtcaatgggactttccagcaatccacccaagagctctttatccccaacatcactgtgaataatagtggatcctatacgtgccaagcccataactcagacactggcctcaataggaccacagtcacgacgatcacagtctatg

SEQ ID NO: 821 - DNA, 190 bp, Artificial
  Synthetic oligonucleotide
ctctcctgccatgcagcctctaacccacctgcacagtattcttggctgattgatgggaacatccagcaacacacacaagagctctttatctccaacatcactgagaagaacagcggactctatacctgccaggccaataactcagccagtggccacagcaggactacagtcaagacaatcacagtctctg

SEQ ID NO: 822 - DNA, 127 bp, Artificial
  Synthetic oligonucleotide
ctgtccaatggcaacaggaccctcactctattcaatgtcacaagaaatgacgcaagagcctatgtatgtggaatccagaactcagtgagtgcaaaccgcagtgacccagtcaccctggatgtcctct

SEQ ID NO: 823 - DNA, 136 bp, Artificial
  Synthetic oligonucleotide
ctaatgttttgtatttttaatacagacggggtttcaccatattggtcaggctggtcttgaactcctgacctcaggtgatccacactcctcggcctcccaaagtgctgggattacaggcgtgaaccaccacacccgg

SEQ ID NO: 824 - DNA, 124 bp, Artificial
  Synthetic oligonucleotide
ccgatttggactttttaacacaggattgggacaggattcagagggacactgtggcccttctacaatcaggagcttcccctttcctctgatgacatcacctgtggctttgttctctttgttccag

SEQ ID NO: 825 - DNA, 255 bp, Artificial
  Synthetic oligonucleotide
atgggccggacacccccatcatttcccccccagactcgtcttacctttcgggagcgaacctcaacctctcctgccactcggcctctaacccatccccgcagtattcttggcgtatcaatgggataccgcagcaacacacacaagttctctttatcgccaaaatcacgccaaataataacgggacctatgcctgttttgtctctaacttggctactggccgcaataattccatagtcaagagcatcacagtctctg

SEQ ID NO: 826 - DNA, 1174 bp, Artificial
  Synthetic oligonucleotide
ctggggtggagtctatctggttctcaccaaagagccaagaagacattttctttcccagtctgtgttccatgggcacaaggaaatcccaaattctatcctgagccccctcactccatctcggccaactctctcctccccggcttctctgatatctcacggctgacctcgggtccagcctggaatgtggggaggggcctcccttagccccagaaggcccccaatagtgaaagggacttcatagtccagaagaaagaagggtccttaaggtcgagttgctcctctctatcaccaatatgtccctttctgtcacctctttgtgttttttcacctactctgtgagctacaaggaacaaggaggctttgaaaccagcccacactttttccccaaatgagaggaggaagccccttggatgaggcaggagcagctcagactctgctccctgctctgcgcccggctcacccggtgactggctctgccctggctccacttggggtgggaccggggcatgtggagaaggtgtccaggtggcctgttttgaatctgggtaaatcaagctgccaatccacagcagagcctcccttgggtcaggttgcagggaaatgggaaaagagggagcctcgggacagactcctgagctgtgtcctggctctgaagtcactggctgtatgaggctgtggacacagcacataggacacagcagaggaaagtgagtgacacacacttggagaaatagggagattcagccataggggctctgcatgggagggaacaggcagtgccaaaaagtgtgtgtttatagagagggtaagactatcagccactatatatatctaacataaaacttaccattaaccatttctaagtgtacaattaagtgaaacagcataaatatcaatcaagtatattgcccggtgtggtggctcatccctgtaatcccagcactttgggaggccaaggcgagtggatcacctgaggtcaggagttcaagatacagaaaaaaaaaaatagctaggcatggtggtgggtgcctgtaatcccagctactcgggaggctgaggcaggagaatcgctcgaacctgggcggtgtagtttgcagtgagccgagattgagccactgcactccagcctgggtgacagagtgagactacatcacaaaaaaaaaaaaaaaaaagg

SEQ ID NO: 827 - DNA, 1762 bp, Artificial
  Synthetic oligonucleotide
ggctcaagtgatcttctgccccagcctcttgagaagctgggactacagacatgtgacaccaagcctggatagttttttaaagaaattttgtagacactgtgtctgcctatgttgcccaggctggtcttgacctcctgacctcaagtaatcctcttgcttgagtctcccaatgtgctgggattaaatgtgtgagccgctatacctccattttcatttctgattttagtaatttgaatcttctctcttttttcttagtcaatctaataaatgattgtcaattttgttgatcttttttgaagaaccaacttttggtttcattgattccttctattgtttttcaattttccattttatttatttaaactctaatccttattatttccttcatgtactatcctgtggtttgaggtggttctttttctgtatcctgaagttgtaaagttaggttgttgatttgagatctctctttatatttaatgtatttaccattaaatttctcacacaagattcttaacttctctgagccttcaattcttcaactgaaaattgtaataattctcatcaccaggaaatggaggaaaaatgaaaattgcaataagaatgactgtttaacagtattgttttaaagatttaatgtaatattcgattaagctttcagcaaaatgctacacacagagggaaacttcataaatattggctcgagatcactactgttattattagcttgaagttaggcagttctagagccaaatcctagatccacttctcactaattatatgactttggataagttttttcaccactccaagtctctgtcatttcatctgtaagatggaaatcatgcctacccaacagggttattgtatggatcaaatgagatgccagaaaagcatttacagtagctaacatagcattaatcatcagcctgagttgactagtgagagccaagccccaaatgaaaacccactaggacatggttactggctaaaaatgggggagagaaaaaaaagttaagtgcaaagaatcaagcctggtatgttagttttcatccactgagattcagccaagatggaattagaggtgcaagataatttaccggggggaaccaccatgaggaaaagtggagtagaagtgggaggagcctgagagagccctcagaccacgatgcagatctgattcctgagaaggagaaagaggagagagttttagatagtgatgcagttctcagagtttccacaaggctggtggggcgtcctcaagcccctcacccatgagagagaagcagagtcccccagaactgggcttttcattcccctggtgggagcccatgagaagcgagttctctgtgcaacggacttagtaaatacagaatgcactagcctgggccttctgccaatcaagtccctgccacagagacccaacagacttatttatgcctaccacaactgagacactgagaaaaagatgcaaccatgaaaagatagaaagttctaatgacacgcaaaaatagcaatcagactttctcaaatttcaaagccttcagaaatagctgagtgcagacaggccagggtggaattgacagaagactgatcaccaactagcaacacagtgagagagaaaaaattgcaactttcccacaaaactaatgcattccttgaagcaacaagtagagactgcttcatgctgagagctggaacctggggcaccccactgtaaaataacatcacattcattccttctcttttctttccatgacggacg

SEQ ID NO: 828 - DNA, 179 bp, Artificial
  Synthetic oligonucleotide
ctcaaaaagaaaagaaaagaagactctgacctgtactcttgaatacaagtttctgataccactgcactgtctgagaatttccaaaactttaatgaactaactgacagcttcatgaaactgtccaccaagatcaagcagagaaaataattaatttcatgggactaaatgaactaatgagg

SEQ ID NO: 829 - DNA, 732 bp, Artificial
  Synthetic oligonucleotide
tttgctgattctttaaatgtcttgtttcccagatttcaggaaactttttttcttttaagctatccacagcttacagcaatttgataaaatatacttttgtgaacaaaaattgagacatttacattttctccctatgtggtcgctccagacttgggaaactattcatgaatatttatattgtatggtaatatagttattgcacaagttcaataaaaatctgctctttgtataacagaatacatttgaaaacattggttatattaccaagactttgactagaatgtcgtatttgaggatataaacccataggtaataaacccacaggtactacaaacaaagtctgaagtcagccttggtttggcttcctagtgtcaattaaacttctaaaagtttaatctgagattccttataaaaacttccagcaaagcaactttaaaaaagtctgtgtgggccgggcgcggtggctcacgcctgtaatcccagcactttgatccgccgaggcgggcggatcacgaggtcaggagatccagaccatcctggctaacacagtgaaaccccgtctctactaaaaatacaaaaaaagttagccgggcgtggtggtgggggcctgtagtcccagctactcaggaggctgaggcaggagaacggcatgaacccgggaggcagggcttgcagtgagccaagatcatgccgctgcactccagcctgggagacaaagtgagactccgtcaa

SEQ ID NO: 830 - DNA, 280 bp, Artificial
  Synthetic oligonucleotide
cggagctgcccaagccctccatctccagcaacaactccaaccccgtggaggacaaggatgctgtggccttcacctgtgaacctgaggttcagaacacaacctacctgtggtgggtaaatggtcagagcctcccggtcagtcccaggctgcagctgtccaatggcaacatgaccctcactctactcagctgtcaaaaggaacgatgcaggatcctatgaatgtgaaatacagaacccagcgagtgccaaccgcagtgacccagtcaccctgaatgtcctct

SEQ ID NO: 831 - DNA, 82 bp, Artificial
  Synthetic oligonucleotide
aatgacacaggattctacaccctacacgtcataaagtcagatcttgtgaatgaagaagcaactggccagttccgggtatacc

SEQ ID NO: 832 - DNA, 104 bp, Artificial
  Synthetic oligonucleotide
cggagctgcccaagccctccatctccagcaacaactccaaacccgtggaggacaaggatgctgtggccttcacctgtgaacctgagactcaggacgcaacctac

SEQ ID NO: 833 - DNA, 48 bp, Artificial
  Synthetic oligonucleotide
ctgtggtgggtaaacaatcagagcctcccggtcagtcccaggctgcag

SEQ ID NO: 834 - DNA, 48 bp, Artificial
  Synthetic oligonucleotide
ctgtccaatggcaacaggaccctcactctattcaatgtcacaagaaat

SEQ ID NO: 835 - DNA, 79 bp, Artificial
  Synthetic oligonucleotide
gacacagcaagctacaaatgtgaaacccagaacccagtgagtgccaggcgcagtgattcagtcatcctgaatgtcctct

SEQ ID NO: 836 - DNA, 3 bp, Artificial
  Synthetic oligonucleotide
cag

SEQ ID NO: 837 - DNA, 6 bp, Artificial
  Synthetic oligonucleotide
agccac

SEQ ID NO: 838 - DNA, 7 bp, Artificial
  Synthetic oligonucleotide
ccaaacc

SEQ ID NO: 839 - DNA, 18 bp, Artificial
  Synthetic oligonucleotide
cttcatcaccagcaacaa

SEQ ID NO: 840 - DNA, 70 bp, Artificial
  Synthetic oligonucleotide
ctccaaccccgtggaggatgaggatgctgtagccttaacctgtgaacctgagattcagaacacaacctac

SEQ ID NO: 841 - DNA, 24 bp, Artificial
  Synthetic oligonucleotide
ctgtggtgggtaaataatcagagc

SEQ ID NO: 842 - DNA, 24 bp, Artificial
  Synthetic oligonucleotide
ctcccggtcagtcccaggctgcag

SEQ ID NO: 843 - DNA, 78 bp, Artificial
  Synthetic oligonucleotide
ctgtccaatgacaacaggaccctcactctactcagtgtcacaaggaatgatgtaggaccctatgagtgtggaatccag

SEQ ID NO: 844 - DNA, 30 bp, Artificial
  Synthetic oligonucleotide
aacgaattaagtgttgaccacagcgaccca

SEQ ID NO: 845 - DNA, 19 bp, Artificial
  Synthetic oligonucleotide
gtcatcctgaatgtcctct

SEQ ID NO: 846 - DNA, 19 bp, Artificial
  Synthetic oligonucleotide
atggcccagacgaccccac

SEQ ID NO: 847 - DNA, 18 bp, Artificial
  Synthetic oligonucleotide
catttccccctcatacac

SEQ ID NO: 848 - DNA, 28 bp, Artificial
  Synthetic oligonucleotide
ctattaccgtccaggggtgaacctcagc

SEQ ID NO: 849 - DNA, 22 bp, Artificial
  Synthetic oligonucleotide
cggagctgcccaagccctccat

SEQ ID NO: 850 - DNA, 82 bp, Artificial
  Synthetic oligonucleotide
ctccagcaacaactccaaacccgtggaggacaaggatgctgtggccttcacctgtgaacctgaggctcagaacacaacctac

SEQ ID NO: 851 - DNA, 48 bp, Artificial
  Synthetic oligonucleotide
ctgtggtgggtaaatggtcagagcctcccagtcagtcccaggctgcag

SEQ ID NO: 852 - DNA, 33 bp, Artificial
  Synthetic oligonucleotide
gtaagtggctccctggagcatcagcatcatatt

SEQ ID NO: 853 - DNA, 6 bp, Artificial
  Synthetic oligonucleotide
attcag

SEQ ID NO: 854 - DNA, 27 bp, Artificial
  Synthetic oligonucleotide
catctggaacttctcctggtctctcag

SEQ ID NO: 855 - DNA, 92 bp, Artificial
  Synthetic oligonucleotide
ctggggccactgtcggcatcatgattggagtgctggttggggttgctctgatatagcagccctggtgtagtttcttcatttcaggaagactg

SEQ ID NO: 856 - DNA, 26 bp, Artificial
  Synthetic oligonucleotide
acagttgttttgcttcttccttaaag

SEQ ID NO: 857 - DNA, 101 bp, Artificial
  Synthetic oligonucleotide
catttgcaacagctacagtctaaaattgcttctttaccaaggatatttacagaaaagactctgaccagagatcgagaccatcctagccaacatcgtgaaac

SEQ ID NO: 858 - DNA, 34 bp, Artificial
  Synthetic oligonucleotide
cccatctctactaaaaatacaaaaatgagctggg

SEQ ID NO: 859 - DNA, 44 bp, Artificial
  Synthetic oligonucleotide
cttggtggcgcgcacctgtagtcccagttactcgggaggctgag

SEQ ID NO: 860 - DNA, 4 bp, Artificial
  Synthetic oligonucleotide
gcag

SEQ ID NO: 861 - DNA, 88 bp, Artificial
  Synthetic oligonucleotide
gagaatcgcttgaacccgggaggtggagattgcagtgagcccagatcgcaccactgcactccagtctggcaacagagcaagactccat

SEQ ID NO: 862 - DNA, 30 bp, Artificial
  Synthetic oligonucleotide
ataatattttcataattttttatttgaaat

SEQ ID NO: 863 - protein, 702 aa, Homo sapiens
MESPSAPPHRWCIPWQRLLLTASLLTFWNPPTTAKLTIESTPFNVAEGKEVLLLVHNLPQHLFGYSWYKGERVDGNRQIIGYVIGTQQATPGPAYSGREIIYPNASLLIQNIIQNDTGFYTLHVIKSDLVNEEATGQFRVYPELPKPSISSNNSKPVEDKDAVAFTCEPETQDATYLWWVNNQSLPVSPRLQLSNGNRTLTLFNVTRNDTASYKCETQNPVSARRSDSVILNVLYGPDAPTISPLNTSYRSGENLNLSCHAASNPPAQYSWFVNGTFQQSTQELFIPNITVNNSGSYTCQAHNSDTGLNRTTVTTITVYAEPPKPFITSNNSNPVEDEDAVALTCEPEIQNTTYLWWVNNQSLPVSPRLQLSNDNRTLTLLSVTRNDVGPYECGIQNELSVDHSDPVILNVLYGPDDPTISPSYTYYRPGVNLSLSCHAASNPPAQYSWLIDGNIQQHTQELFISNITEKNSGLYTCQANNSASGHSRTTVKTITVSAELPKPSISSNNSKPVEDKDAVAFTCEPEAQNTTYLWWVNGQSLPVSPRLQLSNGNRTLTLFNVTRNDARAYVCGIQNSVSANRSDPVTLDVLYGPDTPIISPPDSSYLSGANLNLSCHSASNPSPQYSWRINGIPQQHTQVLFIAKITPNNNGTYACFVSNLATGRNNSIVKSITVSASGTSPGLSAGATVGIMIGVLVGVALI

SEQ ID NO: 864 - protein, 315 aa, Homo sapiens
MESPSAPPHRWCIPWQRLLLTASLLTFWNPPTTAKLTIESTPFNVAEGKEVLLLVHNLPQHLFGYSWYKGERVDGNRQIIGYVIGTQQATPGPAYSGREIIYPNASLLIQNIIQNDTGFYTLHVIKSDLVNEEATGQFRVYPELPKPSISSNNSKPVEDKDAVAFTCEPETQDATYLWWVNNQSLPVSPRLQLSNGNRTLTLFNVTRNDTASYKCETQNPVSARRSDSVILNVLCEYICSSLAQAASPNPQGQRQDFSVPLRFKYTDPQPWTSRLSVTFCPRKTWADQVLTKNRRGGAASVLGGSGSTPYDGRNR

SEQ ID NO: 865 - protein, 719 aa, Homo sapiens
MESPSAPPHRWCIPWQRLLLTASLLTFWNPPTTAKLTIESTPFNVAEGKEVLLLVHNLPQHLFGYSWYKGERVDGNRQIIGYVIGTQQATPGPAYSGREIIYPNASLLIQNIIQNDTGFYTLHVIKSDLVNEEATGQFRVYPELPKPSISSNNSKPVEDKDAVAFTCEPETQDATYLWWVNNQSLPVSPRLQLSNGNRTLTLFNVTRNDTASYKCETQNPVSARRSDSVILNVLYGPDAPTISPLNTSYRSGENLNLSCHAASNPPAQYSWFVNGTFQQSTQELFIPNITVNNSGSYTCQAHNSDTGLNRTTVTTITVYAEPPKPFITSNNSNPVEDEDAVALTCEPEIQNTTYLWWVNNQSLPVSPRLQLSNDNRTLTLLSVTRNDVGPYECGIQNELSVDHSDPVILNVLYGPDDPTISPSYTYYRPGVNLSLSCHAASNPPAQYSWLIDGNIQQHTQELFISNITEKNSGLYTCQANNSASGHSRTTVKTITVSAELPKPSISSNNSKPVEDKDAVAFTCEPEAQNTTYLWWVNGQSLPVSPRLQLSNGNRTLTLFNVTRNDARAYVCGIQNSVSANRSDPVTLDVLYGPDTPIISPPDSSYLSGANLNLSCHSASNPSPQYSWRINGIPQQHTQVLFIAKITPNNNGTYACFVSNLATGRNNSIVKSITVSGKWLPGASASYSGVESIWFSPKSQEDIFFPSLCSMGTRKSQILS

SEQ ID NO: 866 - protein, 693 aa, Homo sapiens
MESPSAPPHRWCIPWQRLLLTASLLTFWNPPTTAKLTIESTPFNVAEGKEVLLLVHNLPQHLFGYSWYKGERVDGNRQIIGYVIGTQQATPGPAYSGREIIYPNASLLIQNIIQNDTGFYTLHVIKSDLVNEEATGQFRVYPELPKPSISSNNSKPVEDKDAVAFTCEPETQDATYLWWVNNQSLPVSPRLQLSNGNRTLTLFNVTRNDTASYKCETQNPVSARRSDSVILNVLYGPDAPTISPLNTSYRSGENLNLSCHAASNPPAQYSWFVNGTFQQSTQELFIPNITVNNSGSYTCQAHNSDTGLNRTTVTTITVYAEPPKPFITSNNSNPVEDEDAVALTCEPEIQNTTYLWWVNNQSLPVSPRLQLSNDNRTLTLLSVTRNDVGPYECGIQNELSVDHSDPVILNVLYGPDDPTISPSYTYYRPGVNLSLSCHAASNPPAQYSWLIDGNIQQHTQELFISNITEKNSGLYTCQANNSASGHSRTTVKTITVSAELPKPSISSNNSKPVEDKDAVAFTCEPEAQNTTYLWWVNGQSLPVSPRLQLSNGNRTLTLFNVTRNDARAYVCGIQNSVSANRSDPVTLDVLYGPDTPIISPPDSSYLSGANLNLSCHSASNPSPQYSWRINGIPQQHTQVLFIAKITPNNNGTYACFVSNLATGRNNSIVKSITVSAGATVGIMIGVLVGVALI

SEQ ID NO: 867 - protein, 524 aa, Homo sapiens
MESPSAPPHRWCIPWQRLLLTASLLTFWNPPTTAKLTIESTPFNVAEGKEVLLLVHNLPQHLFGYSWYKGERVDGNRQIIGYVIGTQQATPGPAYSGREIIYPNASLLIQNIIQNDTGFYTLHVIKSDLVNEEATGQFRVYPELPKPSISSNNSKPVEDKDAVAFTCEPETQDATYLWWVNNQSLPVSPRLQLSNGNRTLTLFNVTRNDTASYKCETQNPVSARRSDSVILNVLYGPDDPTISPSYTYYRPGVNLSLSCHAASNPPAQYSWLIDGNIQQHTQELFISNITEKNSGLYTCQANNSASGHSRTTVKTITVSAELPKPSISSNNSKPVEDKDAVAFTCEPEAQNTTYLWWVNGQSLPVSPRLQLSNGNRTLTLFNVTRNDARAYVCGIQNSVSANRSDPVTLDVLYGPDTPIISPPDSSYLSGANLNLSCHSASNPSPQYSWRINGIPQQHTQVLFIAKITPNNNGTYACFVSNLATGRNNSIVKSITVSASGTSPGLSAGATVGIMIGVLVGVALI

SEQ ID NO: 868 - protein, 569 aa, Homo sapiens
MESPSAPPHRWCIPWQRLLLTASLLTFWNPPTTAKLTIESTPFNVAEGKEVLLLVHNLPQHLFGYSWYKGERVDGNRQIIGYVIGTQQATPGPAYSGREIIYPNASLLIQNIIQNDTGFYTLHVIKSDLVNEEATGQFRVYPELPKPSISSNNSKPVEDKDAVAFTCEPETQDATYLWWVNNQSLPVSPRLQLSNGNRTLTLFNVTRNDTASYKCETQNPVSARRSDSVILNVLYGPDAPTISPLNTSYRSGENLNLSCHAASNPPAQYSWFVNGTFQQSTQELFIPNITVNNSGSYTCQAHNSDTGLNRTTVTTITVYAEPPKPFITSNNSNPVEDEDAVALTCEPEIQNTTYLWWVNNQSLPVSPRLQLSNDNRTLTLLSVTRNDVGPYECGIQNELSVDHSDPVILNVLYGPDDPTISPSYTYYRPGVNLSLSCHAASNPPAQYSWLIDGNIQQHTQELFISNITEKNSGLYTCQANNSASGHSRTTVKTITVSAELPKPSISSNNSNPVEDKDAVAFTCEPEVQNTTYLWWVNGQSLPVSPRLQLSNGNMTLTLLSCQKERCRIL

SEQ ID NO: 869 - protein, 346 aa, Homo sapiens
MESPSAPPHRWCIPWQRLLLTASLLTFWNPPTTAKLTIESTPFNVAEGKEVLLLVHNLPQHLFGYSWYKGERVDGNRQIIGYVIGTQQATPGPAYSGREIIYPNASLLIQNIIQNDTGFYTLHVIKSDLVNEEATGQFRVYPELPKPSISSNNSKPVEDKDAVAFTCEPETQDATYLWWVNNQSLPVSPRLQLSNGNRTLTLFNVTRNDTASYKCETQNPVSARRSDSVILNVLYGPDTPIISPPDSSYLSGANLNLSCHSASNPSPQYSWRINGIPQQHTQVLFIAKITPNNNGTYACFVSNLATGRNNSIVKSITVSASGTSPGLSAGATVGIMIGVLVGVALI

SEQ ID NO: 870 - protein, 346 aa, Homo sapiens
MESPSAPPHRWCIPWQRLLLTASLLTFWNPPTTAKLTIESTPFNVAEGKEVLLLVHNLPQHLFGYSWYKGERVDGNRQIIGYVIGTQQATPGPAYSGREIIYPNASLLIQNIIQNDTGFYTLHVIKSDLVNEEATGQFRVYPELPKPSISSNNSKPVEDKDAVAFTCEPEAQNTTYLWWVNGQSLPVSPRLQLSNGNRTLTLFNVTRNDARAYVCGIQNSVSANRSDPVTLDVLYGPDTPIISPPDSSYLSGANLNLSCHSASNPSPQYSWRINGIPQQHTQVLFIAKITPNNNGTYACFVSNLATGRNNSIVKSITVSASGTSPGLSAGATVGIMIGVLVGVALI

SEQ ID NO: 871 - DNA, 2194 bp, Homo sapiens
gcaagtgcgaggaagatatttaaaggcgtcggcgccacgcgcatatccctgctcggcgctgcccgcccagttcctgttcccagactgaggcccagcccccttcgcccgtttccatcacgagtgccgccagcatgtctgacaaactgccctacaaagtcgccgacatcggcctggctgcctggggacgcaaggccctggacattgctgagaacgagatgccgggcctgatgcgtatgcgggagcggtactcggcctccaagccactgaagggcgcccgcatcgctggctgcctgcacatgaccgtggagacggccgtcctcattgagaccctcgtcaccctgggtgctgaggtgcagtggtccagctgcaacatcttctccacccaggaccatgcggcggctgccattgccaaggctggcattccggtgtatgcctggaagggcgaaacggacgaggagtacctgtggtgcattgagcagaccctgtacttcaaggacgggcccctcaacatgattctggacgacgggggcgacctcaccaacctcatccacaccaagtacccgcagcttctgccaggcatccgaggcatctctgaggagaccacgactggggtccacaacctctacaagatgatggccaatgggatcctcaaggtgcctgccatcaatgtcaatgactccgtcaccaagagcaagtttgacaacctctatggctgccgggagtccctcatagatggcatcaagcgggccacagatgtgatgattgccggcaaggtagcggtggtagcaggctatggtgatgtgggcaagggctgtgcccaggccctgcggggtttcggagcccgcgtcatcatcaccgagattgaccccatcaacgcactgcaggctgccatggagggctatgaggtgaccaccatggatgaggcctgtcaggagggcaacatctttgtcaccaccacaggctgtattgacatcatccttggccggcactttgagcagatgaaggatgatgccattgtgtgtaacattggacactttgacgtggagatcgatgtcaagtggctcaacgagaacgccgtggagaaggtgaacatcaagccgcaggtggaccggtatcggttgaagaatgggcgccgcatcatcctgctggccgagggtcggctggtcaacctgggttgtgccatgggccaccccagcttcgtgatgagtaactccttcaccaaccaggtgatggcgcagatcgagctgtggacccatccagacaagtaccccgttggggttcatttcctgcccaagaagctggatgaggcagtggctgaagcccacctgggcaagctgaatgtgaagttgaccaagctaactgagaagcaagcccagtacctgggcatgtcctgtgatggccccttcaagccggatcactaccgctactgagagccaggtctgcgtttcaccctccagctgctgtccttgcccaggccccacctctcctccctaagagctaatggcaccaactttgtgattggtttgtcagtgtcccccatcgactctctggggctgatcacttagtttttggcctctgctgcagccgtcatactgttccaaatgtggcagcgggaacagagtaccctcttcaagccccggtcatgatggaggtcccagccacagggaaccatgagctcagtggtcttggaacagctcactaagtcagtccttccttagcctggaagtcagtagtggagtcacaaagcccatgtgttttgccatctaggccttcacctggtctgtggacttatacctgtgtgcttggtttacaggtccagtggttcttcagcccatgacagatgagaaggggctatattgaagggcaaagaggaactgttgtttgaattttcctgagagcctggcttagtgctgggccttctcttaaacctcattacaatgaggttagtacttttagtccctgttttacaggggttagaatagactgttaaggggcaactgagaaagaacagagaagtgacagctaggggttgagaggggccagaaaaacatgaatgcaggcagatttcgtgaaatctgccaccactttataaccagatggttcctttcacaaccctgggtcaaaaagagaataatttggcctataatgttaaaagaaagcaggaaggtgggtaaataaaaatcttggtgcctgg

SEQ ID NO: 872 - DNA, 2279 bp, Homo sapiens
aaaaaaagacactattaagtctggagaatgccatccacatttatggaaacacttgctgtatatctggtgatttacgtgtgtttacacaataatcttcatagagatggacgtaatcccgttatatagagcatgaaactgaggcccttgggaggtgacttgcaaagattctgttgaagtagttcatcaagttgctaccagagtagactgtctccattgtgtggatgctgaaactgaacccagaaagccgacatcggcctggctgcctggggacgcaaggccctggacattgctgagaacgagatgccgggcctgatgcgtatgcgggagcggtactcggcctccaagccactgaagggcgcccgcatcgctggctgcctgcacatgaccgtggagacggccgtcctcattgagaccctcgtcaccctgggtgctgaggtgcagtggtccagctgcaacatcttctccacccaggaccatgcggcggctgccattgccaaggctggcattccggtgtatgcctggaagggcgaaacggacgaggagtacctgtggtgcattgagcagaccctgtacttcaaggacgggcccctcaacatgattctggacgacgggggcgacctcaccaacctcatccacaccaagtacccgcagcttctgccaggcatccgaggcatctctgaggagaccacgactggggtccacaacctctacaagatgatggccaatgggatcctcaaggtgcctgccatcaatgtcaatgactccgtcaccaagagcaagtttgacaacctctatggctgccgggagtccctcatagatggcatcaagcgggccacagatgtgatgattgccggcaaggtagcggtggtagcaggctatggtgatgtgggcaagggctgtgcccaggccctgcggggtttcggagcccgcgtcatcatcaccgagattgaccccatcaacgcactgcaggctgccatggagggctatgaggtgaccaccatggatgaggcctgtcaggagggcaacatctttgtcaccaccacaggctgtattgacatcatccttggccggcactttgagcagatgaaggatgatgccattgtgtgtaacattggacactttgacgtggagatcgatgtcaagtggctcaacgagaacgccgtggagaaggtgaacatcaagccgcaggtggaccggtatcggttgaagaatgggcgccgcatcatcctgctggccgagggtcggctggtcaacctgggttgtgccatgggccaccccagcttcgtgatgagtaactccttcaccaaccaggtgatggcgcagatcgagctgtggacccatccagacaagtaccccgttggggttcatttcctgcccaagaagctggatgaggcagtggctgaagcccacctgggcaagctgaatgtgaagttgaccaagctaactgagaagcaagcccagtacctgggcatgtcctgtgatggccccttcaagccggatcactaccgctactgagagccaggtctgcgtttcaccctccagctgctgtccttgcccaggccccacctctcctccctaagagctaatggcaccaactttgtgattggtttgtcagtgtcccccatcgactctctggggctgatcacttagtttttggcctctgctgcagccgtcatactgttccaaatgtggcagcgggaacagagtaccctcttcaagccccggtcatgatggaggtcccagccacagggaaccatgagctcagtggtcttggaacagctcactaagtcagtccttccttagcctggaagtcagtagtggagtcacaaagcccatgtgttttgccatctaggccttcacctggtctgtggacttatacctgtgtgcttggtttacaggtccagtggttcttcagcccatgacagatgagaaggggctatattgaagggcaaagaggaactgttgtttgaattttcctgagagcctggcttagtgctgggccttctcttaaacctcattacaatgaggttagtacttttagtccctgttttacaggggttagaatagactgttaaggggcaactgagaaagaacagagaagtgacagctaggggttgagaggggccagaaaaacatgaatgcaggcagatttcgtgaaatctgccaccactttataaccagatggttcctttcacaaccctgggtcaaaaagagaataatttggcctataatgttaaaagaaagcaggaaggtgggtaaataaaaatcttggtgcctgg

SEQ ID NO: 873 - DNA, 2875 bp, Homo sapiens
gtggcgggggctgcagggccgactcggggctctctggaccccctggaatcgcagcctcggcgcgtttctggccgcgcgaagccagctggaagttggagttctcgcgcggccatgagcgggccgttccgggtggccgtggactacaagtcccagcatgccccgcgacgccggggccgccgcgcggtctgcgagccgcaaactggcggcgtgctccgcgggagagcacacctggccacggcctgggacggctggcacctgccggaccctgctcggggggcctgcgcccggcctcctaggcctggaccggaccctgtccagctgggcggccccgacgagcgtccacccctctctgggcctcctacagggacggcgagggcaccccggagggtgtatgaggagaggcctggaaagcgagccccaggccggctccgatcctcctctcccctgggactttgggccagttacccaacctgtggggtcccccacccctccagcaggggcagccttgcagaaatctcgaagaaaatttggagtggtttgaaaaatcctgctgtcccaccgattgaagtgtaatacagggatagttaacgtttacttagtgtttcctgtgggatcggcactgccttctagctttattctagtctcatggctctgtagggaaactgttctcattttatgatgagaatcctgaggcagaggtaacttgccctcagtcttacagctggtggtgatggagcaagattggaacgcaggccatctagatctctgagcgcaccctttcaccactgtgtgcaagcgaatacacgcggaacaatcctagtgaattttcagcaaaaaccaccgacatcggcctggctgcctggggacgcaaggccctggacattgctgagaacgagatgccgggcctgatgcgtatgcgggagcggtactcggcctccaagccactgaagggcgcccgcatcgctggctgcctgcacatgaccgtggagacggccgtcctcattgagaccctcgtcaccctgggtgctgaggtgcagtggtccagctgcaacatcttctccacccaggaccatgcggcggctgccattgccaaggctggcattccggtgtatgcctggaagggcgaaacggacgaggagtacctgtggtgcattgagcagaccctgtacttcaaggacgggcccctcaacatgattctggacgacgggggcgacctcaccaacctcatccacaccaagtacccgcagcttctgccaggcatccgaggcatctctgaggagaccacgactggggtccacaacctctacaagatgatggccaatgggatcctcaaggtgcctgccatcaatgtcaatgactccgtcaccaagagcaagtttgacaacctctatggctgccgggagtccctcatagatggcatcaagcgggccacagatgtgatgattgccggcaaggtagcggtggtagcaggctatggtgatgtgggcaagggctgtgcccaggccctgcggggtttcggagcccgcgtcatcatcaccgagattgaccccatcaacgcactgcaggctgccatggagggctatgaggtgaccaccatggatgaggcctgtcaggagggcaacatctttgtcaccaccacaggctgtattgacatcatccttggccggcactttgagcagatgaaggatgatgccattgtgtgtaacattggacactttgacgtggagatcgatgtcaagtggctcaacgagaacgccgtggagaaggtgaacatcaagccgcaggtggaccggtatcggttgaagaatgggcgccgcatcatcctgctggccgagggtcggctggtcaacctgggttgtgccatgggccaccccagcttcgtgatgagtaactccttcaccaaccaggtgatggcgcagatcgagctgtggacccatccagacaagtaccccgttggggttcatttcctgcccaagaagctggatgaggcagtggctgaagcccacctgggcaagctgaatgtgaagttgaccaagctaactgagaagcaagcccagtacctgggcatgtcctgtgatggccccttcaagccggatcactaccgctactgagagccaggtctgcgtttcaccctccagctgctgtccttgcccaggccccacctctcctccctaagagctaatggcaccaactttgtgattggtttgtcagtgtcccccatcgactctctggggctgatcacttagtttttggcctctgctgcagccgtcatactgttccaaatgtggcagcgggaacagagtaccctcttcaagccccggtcatgatggaggtcccagccacagggaaccatgagctcagtggtcttggaacagctcactaagtcagtccttccttagcctggaagtcagtagtggagtcacaaagcccatgtgttttgccatctaggccttcacctggtctgtggacttatacctgtgtgcttggtttacaggtccagtggttcttcagcccatgacagatgagaaggggctatattgaagggcaaagaggaactgttgtttgaattttcctgagagcctggcttagtgctgggccttctcttaaacctcattacaatgaggttagtacttttagtccctgttttacaggggttagaatagactgttaaggggcaactgagaaagaacagagaagtgacagctaggggttgagaggggccagaaaaacatgaatgcaggcagatttcgtgaaatctgccaccactttataaccagatggttcctttcacaaccctgggtcaaaaagagaataatttggcctataatgttaaaagaaagcaggaaggtgggtaaataaaaatcttggtgcctgg

SEQ ID NO: 874 - DNA, 2240 bp, Homo sapiens
gcaagtgcgaggaagatatttaaaggcgtcggcgccacgcgcatatccctgctcggcgctgcccgcccagttcctgttcccagactgaggcccagcccccttcgcccgtttccatcacgagtgccgccagcatgtctgacaaactgccctacaaagtcgccgacatcggcctggctgcctggggacgcaaggccctggacattgctgagaacgagatgccgggcctgatgcgtatgcgggagcggtactcggcctccaagccactgaagggcgcccgcatcgctggctgcctgcacatgaccgtggagacggccgtcctcattgagaccctcgtcaccctgggtgctgaggtgcagtggtccagctgcaacatcttctccacccaggaccatgcggcggctgccattgccaaggctggcattccgggtaccagttgggaagtccaggccctgatgtgccactcaccctccagtgtatgcctggaagggcgaaacggacgaggagtacctgtggtgcattgagcagaccctgtacttcaaggacgggcccctcaacatgattctggacgacgggggcgacctcaccaacctcatccacaccaagtacccgcagcttctgccaggcatccgaggcatctctgaggagaccacgactggggtccacaacctctacaagatgatggccaatgggatcctcaaggtgcctgccatcaatgtcaatgactccgtcaccaagagcaagtttgacaacctctatggctgccgggagtccctcatagatggcatcaagcgggccacagatgtgatgattgccggcaaggtagcggtggtagcaggctatggtgatgtgggcaagggctgtgcccaggccctgcggggtttcggagcccgcgtcatcatcaccgagattgaccccatcaacgcactgcaggctgccatggagggctatgaggtgaccaccatggatgaggcctgtcaggagggcaacatctttgtcaccaccacaggctgtattgacatcatccttggccggcactttgagcagatgaaggatgatgccattgtgtgtaacattggacactttgacgtggagatcgatgtcaagtggctcaacgagaacgccgtggagaaggtgaacatcaagccgcaggtggaccggtatcggttgaagaatgggcgccgcatcatcctgctggccgagggtcggctggtcaacctgggttgtgccatgggccaccccagcttcgtgatgagtaactccttcaccaaccaggtgatggcgcagatcgagctgtggacccatccagacaagtaccccgttggggttcatttcctgcccaagaagctggatgaggcagtggctgaagcccacctgggcaagctgaatgtgaagttgaccaagctaactgagaagcaagcccagtacctgggcatgtcctgtgatggccccttcaagccggatcactaccgctactgagagccaggtctgcgtttcaccctccagctgctgtccttgcccaggccccacctctcctccctaagagctaatggcaccaactttgtgattggtttgtcagtgtcccccatcgactctctggggctgatcacttagtttttggcctctgctgcagccgtcatactgttccaaatgtggcagcgggaacagagtaccctcttcaagccccggtcatgatggaggtcccagccacagggaaccatgagctcagtggtcttggaacagctcactaagtcagtccttccttagcctggaagtcagtagtggagtcacaaagcccatgtgttttgccatctaggccttcacctggtctgtggacttatacctgtgtgcttggtttacaggtccagtggttcttcagcccatgacagatgagaaggggctatattgaagggcaaagaggaactgttgtttgaattttcctgagagcctggcttagtgctgggccttctcttaaacctcattacaatgaggttagtacttttagtccctgttttacaggggttagaatagactgttaaggggcaactgagaaagaacagagaagtgacagctaggggttgagaggggccagaaaaacatgaatgcaggcagatttcgtgaaatctgccaccactttataaccagatggttcctttcacaaccctgggtcaaaaagagaataatttggcctataatgttaaaagaaagcaggaaggtgggtaaataaaaatcttggtgcctgg

SEQ ID NO: 875 - DNA, 2452 bp, Homo sapiens
aaaaaaagacactattaagtctggagaatgccatccacatttatggaaacacttgctgtatatctggtgatttacgtgtgtttacacaataatcttcatagagatggacgtaatcccgttatatagagcatgaaactgaggcccttgggaggtgacttgcaaagattctgttgaagtagttcatcaagttgctaccagagtagactgtctccattgtgtggatgctgaaactgaacccagaaagccgacatcggcctggctgcctggggacgcaaggccctggacattgctgagaacgagatgccgggcctgatgcgtatgcgggagcggtactcggcctccaagccactgaagggcgcccgcatcgctggctgcctgcacatgaccgtggagacggccgtcctcattgagaccctcgtcaccctgggtgctgaggtgaggcccacagctgtatcaccccagagtccttgccctccctgggttcagccagggaagaagacgactgtgccagggtggggaccttccaggtgtggagctgaccgcgggcctggaggggttcctccctctcactcggtttcctccgtttcccagtgctgccaccccttgtggtgcagtggtccagctgcaacatcttctccacccaggaccatgcggcggctgccattgccaaggctggcattccggtgtatgcctggaagggcgaaacggacgaggagtacctgtggtgcattgagcagaccctgtacttcaaggacgggcccctcaacatgattctggacgacgggggcgacctcaccaacctcatccacaccaagtacccgcagcttctgccaggcatccgaggcatctctgaggagaccacgactggggtccacaacctctacaagatgatggccaatgggatcctcaaggtgcctgccatcaatgtcaatgactccgtcaccaagagcaagtttgacaacctctatggctgccgggagtccctcatagatggcatcaagcgggccacagatgtgatgattgccggcaaggtagcggtggtagcaggctatggtgatgtgggcaagggctgtgcccaggccctgcggggtttcggagcccgcgtcatcatcaccgagattgaccccatcaacgcactgcaggctgccatggagggctatgaggtgaccaccatggatgaggcctgtcaggagggcaacatctttgtcaccaccacaggctgtattgacatcatccttggccggcactttgagcagatgaaggatgatgccattgtgtgtaacattggacactttgacgtggagatcgatgtcaagtggctcaacgagaacgccgtggagaaggtgaacatcaagccgcaggtggaccggtatcggttgaagaatgggcgccgcatcatcctgctggccgagggtcggctggtcaacctgggttgtgccatgggccaccccagcttcgtgatgagtaactccttcaccaaccaggtgatggcgcagatcgagctgtggacccatccagacaagtaccccgttggggttcatttcctgcccaagaagctggatgaggcagtggctgaagcccacctgggcaagctgaatgtgaagttgaccaagctaactgagaagcaagcccagtacctgggcatgtcctgtgatggccccttcaagccggatcactaccgctactgagagccaggtctgcgtttcaccctccagctgctgtccttgcccaggccccacctctcctccctaagagctaatggcaccaactttgtgattggtttgtcagtgtcccccatcgactctctggggctgatcacttagtttttggcctctgctgcagccgtcatactgttccaaatgtggcagcgggaacagagtaccctcttcaagccccggtcatgatggaggtcccagccacagggaaccatgagctcagtggtcttggaacagctcactaagtcagtccttccttagcctggaagtcagtagtggagtcacaaagcccatgtgttttgccatctaggccttcacctggtctgtggacttatacctgtgtgcttggtttacaggtccagtggttcttcagcccatgacagatgagaaggggctatattgaagggcaaagaggaactgttgtttgaattttcctgagagcctggcttagtgctgggccttctcttaaacctcattacaatgaggttagtacttttagtccctgttttacaggggttagaatagactgttaaggggcaactgagaaagaacagagaagtgacagctaggggttgagaggggccagaaaaacatgaatgcaggcagatttcgtgaaatctgccaccactttataaccagatggttcctttcacaaccctgggtcaaaaagagaataatttggcctataatgttaaaagaaagcaggaaggtgggtaaataaaaatcttggtgcctgg

SEQ ID NO: 876 - DNA, 1927 bp, Homo sapiens
gcaagtgcgaggaagatatttaaaggcgtcggcgccacgcgcatatccctgctcggcgctgcccgcccagttcctgttcccagactgaggcccagcccccttcgcccgtttccatcacgagtgccgccagcatgtctgacaaactgccctacaaagtcgtgtatgcctggaagggcgaaacggacgaggagtacctgtggtgcattgagcagaccctgtacttcaaggacgggcccctcaacatgattctggacgacgggggcgacctcaccaacctcatccacaccaagtacccgcagcttctgccaggcatccgaggcatctctgaggagaccacgactggggtccacaacctctacaagatgatggccaatgggatcctcaaggtgcctgccatcaatgtcaatgactccgtcaccaagagcaagtttgacaacctctatggctgccgggagtccctcatagatggcatcaagcgggccacagatgtgatgattgccggcaaggtagcggtggtagcaggctatggtgatgtgggcaagggctgtgcccaggccctgcggggtttcggagcccgcgtcatcatcaccgagattgaccccatcaacgcactgcaggctgccatggagggctatgaggtgaccaccatggatgaggcctgtcaggagggcaacatctttgtcaccaccacaggctgtattgacatcatccttggccggcactttgagcagatgaaggatgatgccattgtgtgtaacattggacactttgacgtggagatcgatgtcaagtggctcaacgagaacgccgtggagaaggtgaacatcaagccgcaggtggaccggtatcggttgaagaatgggcgccgcatcatcctgctggccgagggtcggctggtcaacctgggttgtgccatgggccaccccagcttcgtgatgagtaactccttcaccaaccaggtgatggcgcagatcgagctgtggacccatccagacaagtaccccgttggggttcatttcctgcccaagaagctggatgaggcagtggctgaagcccacctgggcaagctgaatgtgaagttgaccaagctaactgagaagcaagcccagtacctgggcatgtcctgtgatggccccttcaagccggatcactaccgctactgagagccaggtctgcgtttcaccctccagctgctgtccttgcccaggccccacctctcctccctaagagctaatggcaccaactttgtgattggtttgtcagtgtcccccatcgactctctggggctgatcacttagtttttggcctctgctgcagccgtcatactgttccaaatgtggcagcgggaacagagtaccctcttcaagccccggtcatgatggaggtcccagccacagggaaccatgagctcagtggtcttggaacagctcactaagtcagtccttccttagcctggaagtcagtagtggagtcacaaagcccatgtgttttgccatctaggccttcacctggtctgtggacttatacctgtgtgcttggtttacaggtccagtggttcttcagcccatgacagatgagaaggggctatattgaagggcaaagaggaactgttgtttgaattttcctgagagcctggcttagtgctgggccttctcttaaacctcattacaatgaggttagtacttttagtccctgttttacaggggttagaatagactgttaaggggcaactgagaaagaacagagaagtgacagctaggggttgagaggggccagaaaaacatgaatgcaggcagatttcgtgaaatctgccaccactttataaccagatggttcctttcacaaccctgggtcaaaaagagaataatttggcctataatgttaaaagaaagcaggaaggtgggtaaataaaaatcttggtgcctgg

SEQ ID NO: 877 - DNA, 3302 bp, Homo sapiens
gcaagtgcgaggaagatatttaaaggcgtcggcgccacgcgcatatccctgctcggcgctgcccgcccagttcctgttcccagactgaggcccagcccccttcgcccgtttccatcacgagtgccgccagcatgtctgacaaactgccctacaaagtcgccgacatcggcctggctgcctggggacgcaaggccctggacattgctgagaacgagatgccgggcctgatgcgtatgcgggagcggtactcggcctccaagccactgaagggcgcccgcatcgctggctgcctgcacatgaccgtggagacggccgtcctcattgagaccctcgtcaccctgggtgctgaggtgcagtggtccagctgcaacatcttctccacccaggaccatgcggcggctgccattgccaaggctggcattccggtgtatgcctggaagggcgaaacggacgaggagtacctgtggtgcattgagcagaccctgtacttcaaggacgggcccctcaacatgattctggacgacgggggcgacctcaccaacctcatccacaccaagtacccgcagcttctgccaggcatccgaggcatctctgaggagaccacgactggggtccacaacctctacaagatgatggccaatgggatcctcaaggtgcctgccatcaatgtcaatgactccgtcaccaagagcaagtttgacaacctctatggctgccgggagtccctcatagatggcatcaagcgggccacagatgtgatgattgccggcaaggtagcggtggtagcaggctatggtgatgtgggcaagggctgtgcccaggccctgcggggtttcggagcccgcgtcatcatcaccgagattgaccccatcaacgcactgcaggctgccatggagggctatgaggtgaccaccatggatgaggcctgtcaggagggcaacatctttgtcaccaccacaggctgtattgacatcatccttggccggcactttgagcagatgaaggatgatgccattgtgtgtaacattggacactttgacgtggagatcgatgtcaagtggctcaacgagaacgccgtggagaaggtgaacatcaagccgcaggtggaccggtatcggttgaagaatgggcgccgcatcatcctgctggccgagggtcggctggtcaacctgggttgtgccatgggccaccccagcttcgtgatgagtaactccttcaccaaccaggtgatggcgcagatcgagctgtggacccatccagacaagtaccccgttggggttcatttcctgcccaagaagctggatgaggcagtggctgaagcccacctgggcaagctgaatgtgaagttgaccaagctaactgagaagcaagcccagtacctgggcatgtcctgtgatggccccttcaagccggatcactaccgctactgagagccaggtcaatcacttgatgtggcctcttactggcaacattagccatggattttgtacccttaggagctatgatgaaaaaaacaacacaagattaaatcaaatgcgagagaaaataatgtgcaaacaagagatgcggtaaacatgaaatatatgaggatactgtgggtataacatgacatactgttttacagtaaactgtttgttgttgtttttgttgttgtttttctgagtctcgctctgtcacccaggctggagtacagtggcgcaatctcggctcactgcaacctctgcctcctgggttcaaatgattctcctggctcagcctcagcctcagcctcccgagtagctgggattataggcgcctgccaccacgcccggcgaatttttgtatttttagtagagatggggtttcgccatgttggtcaggctggtttataggaccactgtcatatatgcagtccgtcatatacacttgggcaacagagtgaggaagaaagaaaggaaagaaaggaaggaaggaaggaaggaaggagaaaagaaaagaaaagagaaaaggaaaaagaaagaaagaaagctgatagcgcccactggatgcctggcctcaaccacaactctggaagacctactgcattaagggtcaattagcacaatggtctaaaacaaaagctatcacctttcccttaggactgactagttatgctatatttttactgattcttaggcactagtggtcttgtctgctacttagaagattacagactggcagattaaaggcacttcactttgggtcatgagccctggaaacaaattgtagccaccaaacagtctggatcactgttgtggtgtgcatggtaagggctcattctctgatgagaccaactagaatcaagcttttgatcaagcttgtgccactcagatggccacagttgccacttagatccatcataacattggacatggtgacaccatcatcaactgggcacaaagtaagggactctgtgtttctgaatcagaagctaccactacatgccagatttgtgacctctgccaaaagttagcctatttgtctcatggtgaaagaggccatattgcactgagtgttgactggctgcagagtgttgactggctcctggtaaattggtgacatcagacctttgacctcttccaagctattccactggtatctcattcctgttgactttttctcaggtaatggttttgctgttctagtctgatcagccaattgtggccacatcattgtggcccttgaaactaatctgtgtcatgattttggctttctggatggtgataatactgcattttttagtgcaaaaactcatcaacaatgggcttatagtcaaagtatttggtagccaattcattatcttcagactggtggtaccattgagagatggaataaacttttaattaaaaaacagcttaattgagatgtaattcacatatcataaaattcaccctttggaaggtttttagtttattcacagagttgtgcaaccatcctacagtatgtagtctttgtggctggcttccttcacttagcaaaatgttttcaaagtttatccatgtgggccgggcgcggtggctcacacctgtagtcccagcactgtgggaggccgaggtgggcagatcatgaggtcaggagatcaagaccatcctggctagcgtggtgaaaccccatctctactaaaaatacaaaaaattagccgggcatggtggtgggtgcctgtagtcccagctacttgggaggctgaggcaggagaatggggtgaacccaggaggcagagctttcagtgagctgagatcgcgccattgtactccagcctgggcaacagagcgagactctgtatc

SEQ ID NO: 878 - DNA, 3442 bp, Homo sapiens
gcaagtgcgaggaagatatttaaaggcgtcggcgccacgcgcatatccctgctcggcgctgcccgcccagttcctgttcccagactgaggcccagcccccttcgcccgtttccatcacgagtgccgccagcatgtctgacaaactgccctacaaagtcgccgacatcggcctggctgcctggggacgcaaggccctggacattgctgagaacgagatgccgggcctgatgcgtatgcgggagcggtactcggcctccaagccactgaagggcgcccgcatcgctggctgcctgcacatgaccgtggagacggccgtcctcattgagaccctcgtcaccctgggtgctgaggtgcagtggtccagctgcaacatcttctccacccaggaccatgcggcggctgccattgccaaggctggcattccggtgtatgcctggaagggcgaaacggacgaggagtacctgtggtgcattgagcagaccctgtacttcaaggacgggcccctcaacatgattctggacgacgggggcgacctcaccaacctcatccacaccaagtacccgcagcttctgccaggcatccgaggcatctctgaggagaccacgactggggtccacaacctctacaagatgatggccaatgggatcctcaaggtgcctgccatcaatgtcaatgactccgtcaccaagagcaagtttgacaacctctatggctgccgggagtccctcatagatggcatcaagcgggccacagatgtgatgattgccggcaaggtagcggtggtagcaggctatggtgatgtgggcaagggctgtgcccaggccctgcggggtttcggagcccgcgtcatcatcaccgagattgaccccatcaacgcactgcaggctgccatggagggctatgaggtgaccaccatggatgaggcctgtcaggagggcaacatctttgtcaccaccacaggctgtattgacatcatccttggccggcactttgagcagatgaaggatgatgccattgtgtgtaacattggacactttgacgtggagatcgatgtcaagtggctcaacgagaacgccgtggagaaggtgaacatcaagccgcaggtggaccggtatcggttgaagaatgggcgccgcatcatcctgctggccgagggtcggctggtcaacctgggttgtgccatgggccaccccagcttcgtgatgagtaactccttcaccaaccaggtgatggcgcagatcgagctgtggacccatccagacaagtaccccgttggggttcatttcctgcccaagaagctggatgaggcagtggctgaagcccacctgggcaagctgaatgtgaagttgaccaagctaactgagaagcaagcccagtacctgggcatgtcctgtgatggccccttcaagccggatcactaccgctactgagagccagccctgccaagcaccaatggccagagacctgggggttcttggtaaagctcatccctgtgaaggacagtgaacacagatcaagaagtatcagctggaccccagcatggaggagcaactgcagacttcagcagactcattcaggtcaatcacttgatgtggcctcttactggcaacattagccatggattttgtacccttaggagctatgatgaaaaaaacaacacaagattaaatcaaatgcgagagaaaataatgtgcaaacaagagatgcggtaaacatgaaatatatgaggatactgtgggtataacatgacatactgttttacagtaaactgtttgttgttgtttttgttgttgtttttctgagtctcgctctgtcacccaggctggagtacagtggcgcaatctcggctcactgcaacctctgcctcctgggttcaaatgattctcctggctcagcctcagcctcagcctcccgagtagctgggattataggcgcctgccaccacgcccggcgaatttttgtatttttagtagagatggggtttcgccatgttggtcaggctggtttataggaccactgtcatatatgcagtccgtcatatacacttgggcaacagagtgaggaagaaagaaaggaaagaaaggaaggaaggaaggaaggaaggagaaaagaaaagaaaagagaaaaggaaaaagaaagaaagaaagctgatagcgcccactggatgcctggcctcaaccacaactctggaagacctactgcattaagggtcaattagcacaatggtctaaaacaaaagctatcacctttcccttaggactgactagttatgctatatttttactgattcttaggcactagtggtcttgtctgctacttagaagattacagactggcagattaaaggcacttcactttgggtcatgagccctggaaacaaattgtagccaccaaacagtctggatcactgttgtggtgtgcatggtaagggctcattctctgatgagaccaactagaatcaagcttttgatcaagcttgtgccactcagatggccacagttgccacttagatccatcataacattggacatggtgacaccatcatcaactgggcacaaagtaagggactctgtgtttctgaatcagaagctaccactacatgccagatttgtgacctctgccaaaagttagcctatttgtctcatggtgaaagaggccatattgcactgagtgttgactggctgcagagtgttgactggctcctggtaaattggtgacatcagacctttgacctcttccaagctattccactggtatctcattcctgttgactttttctcaggtaatggttttgctgttctagtctgatcagccaattgtggccacatcattgtggcccttgaaactaatctgtgtcatgattttggctttctggatggtgataatactgcattttttagtgcaaaaactcatcaacaatgggcttatagtcaaagtatttggtagccaattcattatcttcagactggtggtaccattgagagatggaataaacttttaattaaaaaacagcttaattgagatgtaattcacatatcataaaattcaccctttggaaggtttttagtttattcacagagttgtgcaaccatcctacagtatgtagtctttgtggctggcttccttcacttagcaaaatgttttcaaagtttatccatgtgggccgggcgcggtggctcacacctgtagtcccagcactgtgggaggccgaggtgggcagatcatgaggtcaggagatcaagaccatcctggctagcgtggtgaaaccccatctctactaaaaatacaaaaaattagccgggcatggtggtgggtgcctgtagtcccagctacttgggaggctgaggcaggagaatggggtgaacccaggaggcagagctttcagtgagctgagatcgcgccattgtactccagcctgggcaacagagcgagactctgtatc

SEQ ID NO: 879 - DNA, 3919 bp, Homo sapiens
gcaagtgcgaggaagatatttaaaggcgtcggcgccacgcgcatatccctgctcggcgctgcccgcccagttcctgttcccagactgaggcccagcccccttcgcccgtttccatcacgagtgccgccagcatgtctgacaaactgccctacaaagtcgccgacatcggcctggctgcctggggacgcaaggccctggacattgctgagaacgagatgccgggcctgatgcgtatgcgggagcggtactcggcctccaagccactgaagggcgcccgcatcgctggctgcctgcacatgaccgtggagacggccgtcctcattgagaccctcgtcaccctgggtgctgaggtgcagtggtccagctgcaacatcttctccacccaggaccatgcggcggctgccattgccaaggctggcattccggtgtatgcctggaagggcgaaacggacgaggagtacctgtggtgcattgagcagaccctgtacttcaaggacgggcccctcaacatgattctggacgacgggggcgacctcaccaacctcatccacaccaagtacccgcagcttctgccaggcatccgaggcatctctgaggagaccacgactggggtccacaacctctacaagatgatggccaatgggatcctcaaggtgcctgccatcaatgtcaatgactccgtcaccaagagcaagtttgacaacctctatggctgccgggagtccctcatagatggcatcaagcgggccacagatgtgatgattgccggcaaggtagcggtggtagcaggctatggtgatgtgggcaagggctgtgcccaggccctgcggggtttcggagcccgcgtcatcatcaccgagattgaccccatcaacgcactgcaggctgccatggagggctatgaggtgaccaccatggatgaggcctgtcaggagggcaacatctttgtcaccaccacaggctgtattgacatcatccttggccggcactttgagcagatgaaggatgatgccattgtgtgtaacattggacactttgacgtggagatcgatgtcaagtggctcaacgagaacgccgtggagaaggtgaacatcaagccgcaggtggaccggtatcggttgaagaatgggcgccgcatcatcctgctggccgagggtcggctggtcaacctgggttgtgccatgggccaccccagcttcgtgatgagtaactccttcaccaaccaggtgatggcgcagatcgagctgtggacccatccagacaagtaccccgttggggttcatttcctgcccaagaagctggatgaggcagtggctgaagcccacctgggcaagctgaatgtgaagttgaccaagctaactgagaagcaagcccagtacctgggcatgtcctgtgatggccccttcaagccggatcactaccgctactgagagccaggtctgctaatctgtcacatgtgtgacactgaccgggtacccacaatgaaagatgatgtgtctcctgctccacccccaataccccaatactccactcctgatatctgggctgcccccatcaaagcttcatggagaaagaaggaattggccaagggtcctgcagtatccaggcctagccctggttggattttttccaggaaagagatgggaagatgaggcctgtggttggtggaaagtggctgtttatggagcagtggactgaactttggaaagaggagccctgggtctgctgctgactcactgtgttccccgcagggacagaaatacctacttcagatggctgtcttgacgctcgaatgatagaacattagtgaggagtttttatgctgagtttttttttttttttttttttttttgagatggagtcttgctctgtcgcccaggctggagtgcagtggcgcgatctcggctcactgcaagctccgcctcccaggttcacgccattctcctgcctcagcctcccgagtagctgggactacaggcgcccgccaccgtgtccggctaattttttatatttttagtagagatggggtttcaccgtggtttcgatctcctgacctcgtgatctgcctgctttggcctcccaaagtgctgggattacaggcatgagccactgtgcccggcctttatgctgagttttaagggctgtatgagacaccaggtggtgggagggagctgttttgagagcagggaatttaggatacttaggaaattagaaaattagagaagtcataggatcttggaactaagggagaaccttagagtcctgtggagcagaacccagcatttgtatgtggagaaacggaggcccagagaagttgtgacttatccgggtcactctgcaggtctgggtgtcccacccgagtccatgtcagggctctttctgcacaccaagccccatgcccacctctgtgtgactggctgtggtgggaggggcctcctaggctagaggtgctgggatcccttttcagtccagaaataatgagcttagagggtctggaagtagcatggactaaaacccaggaaggatccacagggactgttgatgccagtgaggactccaggaagccggatcacggggactgttgatgccagtgaggactccaggaagctgctgttgggacagccctgctttgggagtctgaggttccaggaaaccccaggaatccggattctcatccctgagacctactcaggactagcccaggggaccgagctaggaaacctgcttgaggtggtagaggcagccaggggtgtgcagtggtccgggcgggcttcgatcagttccaggttggttgcttctccaaactggctccaagacaggcatgtggctcaagttggtctggactcaatcccgggactttaggacttttgctagaaatctggtgtggtgcaggagcgactccaggattcactctgtgggctgcttggactcagactcccccaggactagaggctgcttctccctggtgggaggagttacaaccttgcaagggttctaaagacccccgggtgctgggtggtgggcttttcctgacaacttccataagttattggaacctaaattcacactgcttagcatcgtaatagtctgatcaaccctgctcagtgttgtcatacttgccctattaccagggagagaaatagagaggtgggtgcctccctagagtatccacccacactgtgtactgaatgcccctcctcaacctgtctctcgtggggacctgcacctgcttttcctactaactgctggcttgtatttattcccctaaagcctgttccataacccagtgtggttcttagacttgagcaaacctcagaaacacctggagggcttatccccagtcctgattctgtaggtctggggtgaggccttatagtgtgcattttaacaacgtccccagtgtttcccaatgctgctggtgcacaccaagtgtagaatttgcctctgtgcctgttgcacagtaggtggaggtggcaactgtaaaagagacccagctatcctaaaaacagaaaaggtactgtcttcagtggggctgccaggattggaaggaatgtgagcctgtagctgctcctttgcccccacgaaggccagcttgccttaggatgaagccaacacagaccgggtgcagcggctcacacctgtgatcccagcactttgggaggccaaggtgggcagatcacctgaggtcaggagtttgagaccagcctggccaacataatgaaaccctagctctactaaaaaaaaaatagaataaaaaaaaagattagccgggcatggtgatgcacgcctgtagtcccagctactcgggaggctgagacaggaaaatcacttgaactgggaggtggcacgttagagtgagttgagatcacacactgccactccaggtctgggggggacaagagacaaggggctcaatctc

SEQ ID NO: 880 - DNA, 3458 bp, Homo sapiens
gcaagtgcgaggaagatatttaaaggcgtcggcgccacgcgcatatccctgctcggcgctgcccgcccagttcctgttcccagactgaggcccagcccccttcgcccgtttccatcacgagtgccgccagcatgtctgacaaactgccctacaaagtcgccgacatcggcctggctgcctggggacgcaaggccctggacattgctgagaacgagatgccgggcctgatgcgtatgcgggagcggtactcggcctccaagccactgaagggcgcccgcatcgctggctgcctgcacatgaccgtggagacggccgtcctcattgagaccctcgtcaccctgggtgctgaggtgcagtggtccagctgcaacatcttctccacccaggaccatgcggcggctgccattgccaaggctggcattccggtgtatgcctggaagggcgaaacggacgaggagtacctgtggtgcattgagcagaccctgtacttcaaggacgggcccctcaacatgattctggacgacgggggcgacctcaccaacctcatccacaccaagtacccgcagcttctgccaggcatccgaggcatctctgaggagaccacgactggggtccacaacctctacaagatgatggccaatgggatcctcaaggtgcctgccatcaatgtcaatgactccgtcaccaagagcaagtttgacaacctctatggctgccgggagtccctcatagatggcatcaagcgggccacagatgtgatgattgccggcaaggtagcggtggtagcaggctatggtgatgtgggcaagggctgtgcccaggccctgcggggtttcggagcccgcgtcatcatcaccgagattgaccccatcaacgcactgcaggctgccatggagggctatgaggtgaccaccatggatgaggcctgtcaggagggcaacatctttgtcaccaccacaggctgtattgacatcatccttggccggcactttgagcagatgaaggatgatgccattgtgtgtaacattggacactttgacgtggagatcgatgtcaagtggctcaacgagaacgccgtggagaaggtgaacatcaagccgcaggtggaccggtatcggttgaagaatgggcgccgcatcatcctgctggccgagggtcggctggtcaacctgggttgtgccatgggccaccccagcttcgtgatgagtaactccttcaccaaccaggtgatggcgcagatcgagctgtggacccatccagacaagtaccccgttggggttcatttcctgcccaagaagctggatgaggcagtggctgaagcccacctgggcaagctgaatgtgaagttgaccaagctaactgagaagcaagcccagtacctgggcatgtcctgtgatggccccttcaagccggatcactaccgctactgagagccaggtctgctaatctgtcacatgtgtgacactgaccgggtacccacaatgaaagatgatgtgtctcctgctccacccccaataccccaatactccactcctgatatctgggctgcccccatcaaagcttcatggagaaagaaggaattggccaagggtcctgcagtatccaggcctagccctggttggattttttccaggaaagagatgggaagatgaggcctgtggttggtggaaagtggctgtttatggagcagtggactgaactttggaaagaggagccctgggtctgctgctgactcactgtgttccccgcagggacagaaatacctacttcagatggctgtcttgacgctcgaatgatagaacattagtgaggagtttttatgctgagtttttttttttttttttttttttttgagatggagtcttgctctgtcgcccaggctggagtgcagtggcgcgatctcggctcactgcaagctccgcctcccaggttcacgccattctcctgcctcagcctcccgagtagctgggactacaggcgcccgccaccgtgtccggctaattttttatatttttagtagagatggggtttcaccgtggtttcgatctcctgacctcgtgatctgcctgctttggcctcccaaagtgctgggattacaggcatgagccactgtgcccggcctttatgctgagttttaagggctgtatgagacaccaggtggtgggagggagctgttttgagagcagggaatttaggatacttaggaaattagaaaattagagaagtcataggatcttggaactaagggagaaccttagagtcctgtggagcagaacccagcatttgtatgtggagaaacggaggcccagagaagttgtgacttatccgggtcactctgcaggtctgggtgtcccacccgagtccatgtcagggctctttctgcacaccaagccccatgcccacctctgtgtgactggctgtggtgggaggggcctcctaggctagaggtgctgggatcccttttcagtccagaaataatgagcttagagggctgcttctccctggtgggaggagttacaaccttgcaagggttctaaagacccccgggtgctgggtggtgggcttttcctgacaacttccataagttattggaacctaaattcacactgcttagcatcgtaatagtctgatcaaccctgctcagtgttgtcatacttgccctattaccagggagagaaatagagaggtgggtgcctccctagagtatccacccacactgtgtactgaatgcccctcctcaacctgtctctcgtggggacctgcacctgcttttcctactaactgctggcttgtatttattcccctaaagcctgttccataacccagtgtggttcttagacttgagcaaacctcagaaacacctggagggcttatccccagtcctgattctgtaggtctggggtgaggccttatagtgtgcattttaacaacgtccccagtgtttcccaatgctgctggtgcacaccaagtgtagaatttgcctctgtgcctgttgcacagtaggtggaggtggcaactgtaaaagagacccagctatcctaaaaacagaaaaggtactgtcttcagtggggctgccaggattggaaggaatgtgagcctgtagctgctcctttgcccccacgaaggccagcttgccttaggatgaagccaacacagaccgggtgcagcggctcacacctgtgatcccagcactttgggaggccaaggtgggcagatcacctgaggtcaggagtttgagaccagcctggccaacataatgaaaccctagctctactaaaaaaaaaatagaataaaaaaaaagattagccgggcatggtgatgcacgcctgtagtcccagctactcgggaggctgagacaggaaaatcacttgaactgggaggtggcacgttagagtgagttgagatcacacactgccactccaggtctgggggggacaagagacaaggggctcaatctc

SEQ ID NO: 881 - DNA, 998 bp, Homo sapiens
gcaagtgcgaggaagatatttaaaggcgtcggcgccacgcgcatatccctgctcggcgctgcccgcccagttcctgttcccagactgaggcccagcccccttcgcccgtttccatcacgagtgccgccagcatgtctgacaaactgccctacaaagtcgccgacatcggcctggctgcctggggacgcaaggccctggacattgctgagaacgagatgccgggcctgatgcgtatgcgggagcggtactcggcctccaagccactgaagggcgcccgcatcgctggctgcctgcacatgaccgtggagacggccgtcctcattgagaccctcgtcaccctgggtgctgaggtgaggcccacagctgtatcaccccagagtccttgccctccctgggttcagccagggaagaagacgactgtgccagggtggggaccttccaggtgtggagctgaccgcgggcctggaggggttcctccctctcactcggtttcctccgtttcccagtgctgccaccccttgtggtgcagtggtccagctgcaacatcttctccacccaggaccatgcggcggctgccattgccaaggctggcattccgggtaagtcctgcttgcttctgagacgtggaatttgtgaagggattctgccctctttgcttcactgactgctagagcaacagacttccttacatatcagaaagggagaggagtcaccgccacaaaatcctagcccagcgaccccacaggaaagagctgctttgtcccatcatcatctaaaatcctgtggaagttgtttattgacccaggtcaagccgtgtaaccaggaagagcaagatcttatgattgggaactacatgatgaagcggaggggaagttcattaaaggaaggatgtggatctctttccaaagaactggggagggctacggggcagaaaaagaggttcactgcctagggtatggcggtctaaaggactgaggaaggaccaagtctaacgagaa

SEQ ID NO: 882 - DNA, 1962 bp, Homo sapiens
attacaggcacccaccaccacacccggctaatttttgtatttttagtagagacggggtttcaccatgttggtcaggctggtcttgaactcctgacctcaagtgatctgcccaccttggcctcccaaagtgttgggattacaggcatgagccactgtgcccggcctttatgctgagttttaagggctgtatgagacaccaggtggtgggagggagctgttttgagagcagggaatttaggatacttaggaaattagaaaattagagaagtcataggatcttggaactaagggagaaccttagagtcctgtggagcagaacccagcatttgtatgtggagaaacggaggcccagagaagttgtgacttatccgggtcactctgcaggtctgggtgtcccacccgagtccatgtcagggctctttctgcacaccaagccccatgcccacctctgtgtgactggctgtggtgggaggggcctcctaggctagaggtgctgggatcccttttcagtccagaaataatgagcttagagggtctggaagtagcatggactaaaacccaggaaggatccacagggactgttgatgccagtgaggactccaggaagccggatcacggggactgttgatgccagtgaggactccaggaagctgctgttgggacagccctgctttgggagtctgaggttccaggaaaccccaggaatccggattctcatccctgagacctactcaggactagcccaggggaccgagctaggaaacctgcttgaggtggtagaggcagccaggggtgtgcagtggtccgggcgggcttcgatcagttccaggttggttgcttctccaaactggctccaagacaggcatgtggctcaagttggtctggactcaatcccgggactttaggacttttgctagaaatctggtgtggtgcaggagcgactccaggattcactctgtgggctgcttggactcagactcccccaggactagaggctgcttctccctggtgggaggagttacaaccttgcaagggttctaaagacccccgggtgctgggtggtgggcttttcctgacaacttccataagttattggaacctaaattcacactgcttagcatcgtaatagtctgatcaaccctgctcagtgttgtcatacttgccctattaccagggagagaaatagagaggtgggtgcctccctagagtatccacccacactgtgtactgaatgcccctcctcaacctgtctctcgtggggacctgcacctgcttttcctactaactgctggcttgtatttattcccctaaagcctgttccataacccagtgtggttcttagacttgagcaaacctcagaaacacctggagggcttatccccagtcctgattctgtaggtctggggtgaggccttatagtgtgcattttaacaacgtccccagtgtttcccaatgctgctggtgcacaccaagtgtagaatttgcctctgtgcctgttgcacagtaggtggaggtggcaactgtaaaagagacccagctatcctaaaaacagaaaaggtactgtcttcagtggggctgccaggattggaaggaatgtgagcctgtagctgctcctttgcccccacgaaggccagcttgccttaggatgaagccaacacagaccgggtgcagcggctcacacctgtgatcccagcactttgggaggccaaggtgggcagatcacctgaggtcaggagtttgagaccagcctggccaacataatgaaaccctagctctactaaaaaaaaaatagaataaaaaaaaagattagccgggcatggtgatgcacgcctgtagtcccagctactcgggaggctgagacaggaaaatcacttgaactgggaggtggcacgttagagtgagttgagatcacacactgccactccaggtctgggggggacaagagacaaggggctcaatctc

SEQ ID NO: 883 - DNA, 159 bp, Artificial
  Synthetic oligonucleotide
gcaagtgcgaggaagatatttaaaggcgtcggcgccacgcgcatatccctgctcggcgctgcccgcccagttcctgttcccagactgaggcccagcccccttcgcccgtttccatcacgagtgccgccagcatgtctgacaaactgccctacaaagtcg

SEQ ID NO: 884 - DNA, 840 bp, Artificial
  Synthetic oligonucleotide
gtggcgggggctgcagggccgactcggggctctctggaccccctggaatcgcagcctcggcgcgtttctggccgcgcgaagccagctggaagttggagttctcgcgcggccatgagcgggccgttccgggtggccgtggactacaagtcccagcatgccccgcgacgccggggccgccgcgcggtctgcgagccgcaaactggcggcgtgctccgcgggagagcacacctggccacggcctgggacggctggcacctgccggaccctgctcggggggcctgcgcccggcctcctaggcctggaccggaccctgtccagctgggcggccccgacgagcgtccacccctctctgggcctcctacagggacggcgagggcaccccggagggtgtatgaggagaggcctggaaagcgagccccaggccggctccgatcctcctctcccctgggactttgggccagttacccaacctgtggggtcccccacccctccagcaggggcagccttgcagaaatctcgaagaaaatttggagtggtttgaaaaatcctgctgtcccaccgattgaagtgtaatacagggatagttaacgtttacttagtgtttcctgtgggatcggcactgccttctagctttattctagtctcatggctctgtagggaaactgttctcattttatgatgagaatcctgaggcagaggtaacttgccctcagtcttacagctggtggtgatggagcaagattggaacgcaggccatctagatctctgagcgcaccctttcaccactgtgtgcaagcgaatacacgcggaacaatcctagtgaattttcagcaaaaacca

SEQ ID NO: 885 - DNA, 244 bp, Artificial
  Synthetic oligonucleotide
aaaaaaagacactattaagtctggagaatgccatccacatttatggaaacacttgctgtatatctggtgatttacgtgtgtttacacaataatcttcatagagatggacgtaatcccgttatatagagcatgaaactgaggcccttgggaggtgacttgcaaagattctgttgaagtagttcatcaagttgctaccagagtagactgtctccattgtgtggatgctgaaactgaacccagaaag

SEQ ID NO: 886 - DNA, 191 bp, Artificial
  Synthetic oligonucleotide
ccgacatcggcctggctgcctggggacgcaaggccctggacattgctgagaacgagatgccgggcctgatgcgtatgcgggagcggtactcggcctccaagccactgaagggcgcccgcatcgctggctgcctgcacatgaccgtggagacggccgtcctcattgagaccctcgtcaccctgggtgctgag

SEQ ID NO: 887 - DNA, 173 bp, Artificial
  Synthetic oligonucleotide
gtgaggcccacagctgtatcaccccagagtccttgccctccctgggttcagccagggaagaagacgactgtgccagggtggggaccttccaggtgtggagctgaccgcgggcctggaggggttcctccctctcactcggtttcctccgtttcccagtgctgccaccccttgtg

SEQ ID NO: 888 - DNA, 399 bp, Artificial
  Synthetic oligonucleotide
gtaagtcctgcttgcttctgagacgtggaatttgtgaagggattctgccctctttgcttcactgactgctagagcaacagacttccttacatatcagaaagggagaggagtcaccgccacaaaatcctagcccagcgaccccacaggaaagagctgctttgtcccatcatcatctaaaatcctgtggaagttgtttattgacccaggtcaagccgtgtaaccaggaagagcaagatcttatgattgggaactacatgatgaagcggaggggaagttcattaaaggaaggatgtggatctctttccaaagaactggggagggctacggggcagaaaaagaggttcactgcctagggtatggcggtctaaaggactgaggaaggaccaagtctaacgagaa

SEQ ID NO: 889 - DNA, 143 bp, Artificial
  Synthetic oligonucleotide
tgtatgcctggaagggcgaaacggacgaggagtacctgtggtgcattgagcagaccctgtacttcaaggacgggcccctcaacatgattctggacgacgggggcgacctcaccaacctcatccacaccaagtacccgcagctt

SEQ ID NO: 890 - DNA, 171 bp, Artificial
  Synthetic oligonucleotide
agcaagtttgacaacctctatggctgccgggagtccctcatagatggcatcaagcgggccacagatgtgatgattgccggcaaggtagcggtggtagcaggctatggtgatgtgggcaagggctgtgcccaggccctgcggggtttcggagcccgcgtcatcatcaccgag

SEQ ID NO: 891 - DNA, 141 bp, Artificial
  Synthetic oligonucleotide
gtctgcgtttcaccctccagctgctgtccttgcccaggccccacctctcctccctaagagctaatggcaccaactttgtgattggtttgtcagtgtcccccatcgactctctggggctgatcacttagtttttggcctctg

SEQ ID NO: 892 - DNA, 151 bp, Artificial
  Synthetic oligonucleotide
agggaaccatgagctcagtggtcttggaacagctcactaagtcagtccttccttagcctggaagtcagtagtggagtcacaaagcccatgtgttttgccatctaggccttcacctggtctgtggacttatacctgtgtgcttggtttacag

SEQ ID NO: 893 - DNA, 296 bp, Artificial
  Synthetic oligonucleotide
cctggcttagtgctgggccttctcttaaacctcattacaatgaggttagtacttttagtccctgttttacaggggttagaatagactgttaaggggcaactgagaaagaacagagaagtgacagctaggggttgagaggggccagaaaaacatgaatgcaggcagatttcgtgaaatctgccaccactttataaccagatggttcctttcacaaccctgggtcaaaaagagaataatttggcctataatgttaaaagaaagcaggaaggtgggtaaataaaaatcttggtgcctgg

SEQ ID NO: 894 - DNA, 662 bp, Artificial
  Synthetic oligonucleotide
gtctgctaatctgtcacatgtgtgacactgaccgggtacccacaatgaaagatgatgtgtctcctgctccacccccaataccccaatactccactcctgatatctgggctgcccccatcaaagcttcatggagaaagaaggaattggccaagggtcctgcagtatccaggcctagccctggttggattttttccaggaaagagatgggaagatgaggcctgtggttggtggaaagtggctgtttatggagcagtggactgaactttggaaagaggagccctgggtctgctgctgactcactgtgttccccgcagggacagaaatacctacttcagatggctgtcttgacgctcgaatgatagaacattagtgaggagtttttatgctgagtttttttttttttttttttttttttgagatggagtcttgctctgtcgcccaggctggagtgcagtggcgcgatctcggctcactgcaagctccgcctcccaggttcacgccattctcctgcctcagcctcccgagtagctgggactacaggcgcccgccaccgtgtccggctaattttttatatttttagtagagatggggtttcaccgtggtttcgatctcctgacctcgtgatctgcctgctttggcctcccaaagtgctgggattacag

SEQ ID NO: 895 - DNA, 391 bp, Artificial
  Synthetic oligonucleotide
gcatgagccactgtgcccggcctttatgctgagttttaagggctgtatgagacaccaggtggtgggagggagctgttttgagagcagggaatttaggatacttaggaaattagaaaattagagaagtcataggatcttggaactaagggagaaccttagagtcctgtggagcagaacccagcatttgtatgtggagaaacggaggcccagagaagttgtgacttatccgggtcactctgcaggtctgggtgtcccacccgagtccatgtcagggctctttctgcacaccaagccccatgcccacctctgtgtgactggctgtggtgggaggggcctcctaggctagaggtgctgggatcccttttcagtccagaaataatgagcttagagg

SEQ ID NO: 896 - DNA, 461 bp, Artificial
  Synthetic oligonucleotide
gtctggaagtagcatggactaaaacccaggaaggatccacagggactgttgatgccagtgaggactccaggaagccggatcacggggactgttgatgccagtgaggactccaggaagctgctgttgggacagccctgctttgggagtctgaggttccaggaaaccccaggaatccggattctcatccctgagacctactcaggactagcccaggggaccgagctaggaaacctgcttgaggtggtagaggcagccaggggtgtgcagtggtccgggcgggcttcgatcagttccaggttggttgcttctccaaactggctccaagacaggcatgtggctcaagttggtctggactcaatcccgggactttaggacttttgctagaaatctggtgtggtgcaggagcgactccaggattcactctgtgggctgcttggactcagactcccccaggactagag

SEQ ID NO: 897 - DNA, 968 bp, Artificial
  Synthetic oligonucleotide
gctgcttctccctggtgggaggagttacaaccttgcaagggttctaaagacccccgggtgctgggtggtgggcttttcctgacaacttccataagttattggaacctaaattcacactgcttagcatcgtaatagtctgatcaaccctgctcagtgttgtcatacttgccctattaccagggagagaaatagagaggtgggtgcctccctagagtatccacccacactgtgtactgaatgcccctcctcaacctgtctctcgtggggacctgcacctgcttttcctactaactgctggcttgtatttattcccctaaagcctgttccataacccagtgtggttcttagacttgagcaaacctcagaaacacctggagggcttatccccagtcctgattctgtaggtctggggtgaggccttatagtgtgcattttaacaacgtccccagtgtttcccaatgctgctggtgcacaccaagtgtagaatttgcctctgtgcctgttgcacagtaggtggaggtggcaactgtaaaagagacccagctatcctaaaaacagaaaaggtactgtcttcagtggggctgccaggattggaaggaatgtgagcctgtagctgctcctttgcccccacgaaggccagcttgccttaggatgaagccaacacagaccgggtgcagcggctcacacctgtgatcccagcactttgggaggccaaggtgggcagatcacctgaggtcaggagtttgagaccagcctggccaacataatgaaaccctagctctactaaaaaaaaaatagaataaaaaaaaagattagccgggcatggtgatgcacgcctgtagtcccagctactcgggaggctgagacaggaaaatcacttgaactgggaggtggcacgttagagtgagttgagatcacacactgccactccaggtctgggggggacaagagacaaggggctcaatctc

SEQ ID NO: 898 - DNA, 140 bp, Artificial
  Synthetic oligonucleotide
ccctgccaagcaccaatggccagagacctgggggttcttggtaaagctcatccctgtgaaggacagtgaacacagatcaagaagtatcagctggaccccagcatggaggagcaactgcagacttcagcagactcattcag

SEQ ID NO: 899 - DNA, 1865 bp, Artificial
  Synthetic oligonucleotide
gtcaatcacttgatgtggcctcttactggcaacattagccatggattttgtacccttaggagctatgatgaaaaaaacaacacaagattaaatcaaatgcgagagaaaataatgtgcaaacaagagatgcggtaaacatgaaatatatgaggatactgtgggtataacatgacatactgttttacagtaaactgtttgttgttgtttttgttgttgtttttctgagtctcgctctgtcacccaggctggagtacagtggcgcaatctcggctcactgcaacctctgcctcctgggttcaaatgattctcctggctcagcctcagcctcagcctcccgagtagctgggattataggcgcctgccaccacgcccggcgaatttttgtatttttagtagagatggggtttcgccatgttggtcaggctggtttataggaccactgtcatatatgcagtccgtcatatacacttgggcaacagagtgaggaagaaagaaaggaaagaaaggaaggaaggaaggaaggaaggagaaaagaaaagaaaagagaaaaggaaaaagaaagaaagaaagctgatagcgcccactggatgcctggcctcaaccacaactctggaagacctactgcattaagggtcaattagcacaatggtctaaaacaaaagctatcacctttcccttaggactgactagttatgctatatttttactgattcttaggcactagtggtcttgtctgctacttagaagattacagactggcagattaaaggcacttcactttgggtcatgagccctggaaacaaattgtagccaccaaacagtctggatcactgttgtggtgtgcatggtaagggctcattctctgatgagaccaactagaatcaagcttttgatcaagcttgtgccactcagatggccacagttgccacttagatccatcataacattggacatggtgacaccatcatcaactgggcacaaagtaagggactctgtgtttctgaatcagaagctaccactacatgccagatttgtgacctctgccaaaagttagcctatttgtctcatggtgaaagaggccatattgcactgagtgttgactggctgcagagtgttgactggctcctggtaaattggtgacatcagacctttgacctcttccaagctattccactggtatctcattcctgttgactttttctcaggtaatggttttgctgttctagtctgatcagccaattgtggccacatcattgtggcccttgaaactaatctgtgtcatgattttggctttctggatggtgataatactgcattttttagtgcaaaaactcatcaacaatgggcttatagtcaaagtatttggtagccaattcattatcttcagactggtggtaccattgagagatggaataaacttttaattaaaaaacagcttaattgagatgtaattcacatatcataaaattcaccctttggaaggtttttagtttattcacagagttgtgcaaccatcctacagtatgtagtctttgtggctggcttccttcacttagcaaaatgttttcaaagtttatccatgtgggccgggcgcggtggctcacacctgtagtcccagcactgtgggaggccgaggtgggcagatcatgaggtcaggagatcaagaccatcctggctagcgtggtgaaaccccatctctactaaaaatacaaaaaattagccgggcatggtggtgggtgcctgtagtcccagctacttgggaggctgaggcaggagaatggggtgaacccaggaggcagagctttcagtgagctgagatcgcgccattgtactccagcctgggcaacagagcgagactctgtatc

SEQ ID NO: 900 - DNA, 95 bp, Artificial
  Synthetic oligonucleotide
attacaggcacccaccaccacacccggctaatttttgtatttttagtagagacggggtttcaccatgttggtcaggctggtcttgaactcctgac

SEQ ID NO: 901 - DNA, 47 bp, Artificial
  Synthetic oligonucleotide
ctcaagtgatctgcccaccttggcctcccaaagtgttgggattacag

SEQ ID NO: 902 - DNA, 76 bp, Artificial
  Synthetic oligonucleotide
gtgcagtggtccagctgcaacatcttctccacccaggaccatgcggcggctgccattgccaaggctggcattccgg

SEQ ID NO: 903 - DNA, 46 bp, Artificial
  Synthetic oligonucleotide
gtaccagttgggaagtccaggccctgatgtgccactcaccctccag

SEQ ID NO: 904 - DNA, 7 bp, Artificial
  Synthetic oligonucleotide
ctgccag

SEQ ID NO: 905 - DNA, 46 bp, Artificial
  Synthetic oligonucleotide
gcatccgaggcatctctgaggagaccacgactggggtccacaacct

SEQ ID NO: 906 - DNA, 35 bp, Artificial
  Synthetic oligonucleotide
ctacaagatgatggccaatgggatcctcaaggtgc

SEQ ID NO: 907 - DNA, 7 bp, Artificial
  Synthetic oligonucleotide
ctgccat

SEQ ID NO: 908 - DNA, 25 bp, Artificial
  Synthetic oligonucleotide
caatgtcaatgactccgtcaccaag

SEQ ID NO: 909 - DNA, 18 bp, Artificial
  Synthetic oligonucleotide
attgaccccatcaacgca

SEQ ID NO: 910 - DNA, 19 bp, Artificial
  Synthetic oligonucleotide
ctgcaggctgccatggagg

SEQ ID NO: 911 - DNA, 88 bp, Artificial
  Synthetic oligonucleotide
gctatgaggtgaccaccatggatgaggcctgtcaggagggcaacatctttgtcaccaccacaggctgtattgacatcatccttggccg

SEQ ID NO: 912 - DNA, 118 bp, Artificial
  Synthetic oligonucleotide
gcactttgagcagatgaaggatgatgccattgtgtgtaacattggacactttgacgtggagatcgatgtcaagtggctcaacgagaacgccgtggagaaggtgaacatcaagccgcag

SEQ ID NO: 913 - DNA, 42 bp, Artificial
  Synthetic oligonucleotide
gtggaccggtatcggttgaagaatgggcgccgcatcatcctg

SEQ ID NO: 914 - DNA, 81 bp, Artificial
  Synthetic oligonucleotide
ctggccgagggtcggctggtcaacctgggttgtgccatgggccaccccagcttcgtgatgagtaactccttcaccaaccag

SEQ ID NO: 915 - DNA, 72 bp, Artificial
  Synthetic oligonucleotide
gtgatggcgcagatcgagctgtggacccatccagacaagtaccccgttggggttcatttcctgcccaagaag

SEQ ID NO: 916 - DNA, 16 bp, Artificial
  Synthetic oligonucleotide
ctggatgaggcagtgg

SEQ ID NO: 917 - DNA, 20 bp, Artificial
  Synthetic oligonucleotide
ctgaagcccacctgggcaag

SEQ ID NO: 918 - DNA, 103 bp, Artificial
  Synthetic oligonucleotide
ctgaatgtgaagttgaccaagctaactgagaagcaagcccagtacctgggcatgtcctgtgatggccccttcaagccggatcactaccgctactgagagccag

SEQ ID NO: 919 - DNA, 14 bp, Artificial
  Synthetic oligonucleotide
ctgcagccgtcata

SEQ ID NO: 920 - DNA, 70 bp, Artificial
  Synthetic oligonucleotide
ctgttccaaatgtggcagcgggaacagagtaccctcttcaagccccggtcatgatggaggtcccagccac

SEQ ID NO: 921 - DNA, 85 bp, Artificial
  Synthetic oligonucleotide
gtccagtggttcttcagcccatgacagatgagaaggggctatattgaagggcaaagaggaactgttgtttgaattttcctgagag

SEQ ID NO: 922 - protein, 432 aa, Homo sapiens
MSDKLPYKVADIGLAAWGRKALDIAENEMPGLMRMRERYSASKPLKGARIAGCLHMTVETAVLIETLVTLGAEVQWSSCNIFSTQDHAAAAIAKAGIPVYAWKGETDEEYLWCIEQTLYFKDGPLNMILDDGGDLTNLIHTKYPQLLPGIRGISEETTTGVHNLYKMMANGILKVPAINVNDSVTKSKFDNLYGCRESLIDGIKRATDVMIAGKVAVVAGYGDVGKGCAQALRGFGARVIITEIDPINALQAAMEGYEVTTMDEACQEGNIFVTTTGCIDIILGRHFEQMKDDAIVCNIGHFDVEIDVKWLNENAVEKVNIKPQVDRYRLKNGRRIILLAEGRLVNLGCAMGHPSFVMSNSFTNQVMAQIELWTHPDKYPVGVHFLPKKLDEAVAEAHLGKLNVKLTKLTEKQAQYLGMSCDGPFKPDHYRY

SEQ ID NO: 923 - protein, 432 aa, Homo sapiens; identical to SEQ ID NO: 922

SEQ ID NO: 924 - protein, 404 aa, Homo sapiens
MPGLMRMRERYSASKPLKGARIAGCLHMTVETAVLIETLVTLGAEVQWSSCNIFSTQDHAAAAIAKAGIPVYAWKGETDEEYLWCIEQTLYFKDGPLNMILDDGGDLTNLIHTKYPQLLPGIRGISEETTTGVHNLYKMMANGILKVPAINVNDSVTKSKFDNLYGCRESLIDGIKRATDVMIAGKVAVVAGYGDVGKGCAQALRGFGARVIITEIDPINALQAAMEGYEVTTMDEACQEGNIFVTTTGCIDIILGRHFEQMKDDAIVCNIGHFDVEIDVKWLNENAVEKVNIKPQVDRYRLKNGRRIILLAEGRLVNLGCAMGHPSFVMSNSFTNQVMAQIELWTHPDKYPVGVHFLPKKLDEAVAEAHLGKLNVKLTKLTEKQAQYLGMSCDGPFKPDHYRY

SEQ ID NO: 925 - protein, 306 aa, Homo sapiens
MILDDGGDLTNLIHTKYPQLLPGIRGISEETTTGVHNLYKMMANGILKVPAINVNDSVTKSKFDNLYGCRESLIDGIKRATDVMIAGKVAVVAGYGDVGKGCAQALRGFGARVIITEIDPINALQAAMEGYEVTTMDEACQEGNIFVTTTGCIDIILGRHFEQMKDDAIVCNIGHFDVEIDVKWLNENAVEKVNIKPQVDRYRLKNGRRIILLAEGRLVNLGCAMGHPSFVMSNSFTNQVMAQIELWTHPDKYPVGVHFLPKKLDEAVAEAHLGKLNVKLTKLTEKQAQYLGMSCDGPFKPDHYRY

SEQ ID NO: 926 - protein, 343 aa, Homo sapiens
MSDKLPYKVVYAWKGETDEEYLWCIEQTLYFKDGPLNMILDDGGDLTNLIHTKYPQLLPGIRGISEETTTGVHNLYKMMANGILKVPAINVNDSVTKSKFDNLYGCRESLIDGIKRATDVMIAGKVAVVAGYGDVGKGCAQALRGFGARVIITEIDPINALQAAMEGYEVTTMDEACQEGNIFVTTTGCIDIILGRHFEQMKDDAIVCNIGHFDVEIDVKWLNENAVEKVNIKPQVDRYRLKNGRRIILLAEGRLVNLGCAMGHPSFVMSNSFTNQVMAQIELWTHPDKYPVGVHFLPKKLDEAVAEAHLGKLNVKLTKLTEKQAQYLGMSCDGPFKPDHYRY

SEQ ID NO: 927 - protein, 162 aa, Homo sapiens
MSDKLPYKVADIGLAAWGRKALDIAENEMPGLMRMRERYSASKPLKGARIAGCLHMTVETAVLIETLVTLGAEVRPTAVSPQSPCPPWVQPGKKTTVPGWGPSRCGADRGPGGVPPSHSVSSVSQCCHPLWCSGPAATSSPPRTMRRLPLPRLAFRVSPACF

SEQ ID NO: 928 - protein, 106 aa, Homo sapiens [sequence omitted]

SEQ ID NO: 929 - DNA, 6772 bp, Homo sapiens
ctcaaatggaagagaaagtatccataagccaggtcagcaacctcagtgaagagcccaacgaatttagagcccgcctaagatctctttattccataaaagagtgtgggattgttgtggaggcagaatttgcggctataaatcaaaggcagttctaaagtttgaactcttgtcaccctgcaccgttcttgagatgcattttctgcacagagtggggaggaagggactgcatttggcaagagattgagtggagtgatgggagggagagaatggagagaaaacagaggggttaggtgcagaccacaggttcaggggctctgattacagcaggagaaagactggcaattactaggaggggtagcagaactggaaaaggtcttttgtttgttagttttttaaggatgggaaggtctagagaagtttgaagacggaatataaggagcccaaatgaaggaagaaatgaaattactagtggagggagtccagggccttaaggatatggaaaggggtaagactgggggtcagtgcacaagtcgggagagcatcctctccaccgacaccagaggaagggtgggggatggtgaggagctcagtacagagttgggtggaggccgttcttcactgctccacgtggtaccatggaggcatccagagccaggccacagtggtggatgcagaagctccaatctggctctttctggagccccaggctgtagatacacactctacatgaggctgaggtaagcagaatagggatttgcctgctttaacagattatgaatttgcactgctgtaaagcaggggctttaaagacagaggggttctgttttatcttcctaagatcggcaatctacggtatcatccagagaccaggtttcttctctcccgttgctctgccatctctggggcatggtgctcacctgcatgggcgaggctggcctgccagcccccagaaaagagcaagaggagggcagtctggaggtggcacttatcacttctcaaaccttacagccacacctaactacagggaggctgagaaatgtcattcccttgggtggccctgtgtccagctaaaatgcaggagtctaggactgaaaaacagaagaggagacaaatattaggggacaattagccatttctgccaaaggcttcagacctaagcctgtgtaactgtgagatctgggtctgcatgcaggcgtgtgacttcacctccctgaccttcatccttctgtaacatgagaccactgtgcacaccaggcatggcgatgagtaagcagcagccatggaggcacctggcaggggcccagaactcagtgggcatgcagtacctgctgttgtttaccgtcctccctttctgccctagggaaaccaatgtacctgcacatcggggaggagatagacggcgtggacatgcgggcggaggttgggcttctgagccggaacatcatagtgatgggggagatggaggacaaatgctacccctacagaaaccacatctgcaatttctttgacttcgatacctttgggggccacatcaagtttgctctgggatttaaggcagcacacttggagggcacggagctgaagcatatgggacagcagctggtgggtcagtacccgattcacttccacctggccggtgatgtagacgaaaggggaggttatgacccacccacatacatcagggacctctccatccatcatacattctctcgctgcgtcacagtccatggctccaatggcttgttgatcaaggacgttgtgggctataactctttgggccactgcttcttcacggaagatgggccggaggaacgcaacacttttgaccactgtcttggcctccttgtcaagtctggaaccctcctcccctcggaccgtgacagcaagatgtgcaagatgatcacagaggactcctacccagggtacatccccaagcccaggcaagactgcaatgctgtgtccaccttctggatggccaatcccaacaacaacctcatcaactgtgccgctgcaggatctgaggaaactggattttggtttatttttcaccacgtaccaacgggcccctccgtgggaatgtactccccaggttattcagagcacattccactgggaaaattctataacaaccgagcacattccaactaccgggctggcatgatcatagacaacggagtcaaaaccaccgaggcctctgccaaggacaagcggccgttcctctcaatcatctctgccagatacagccctcaccaggacgccgacccgctgaagccccgggagccggccatcatcagacacttcattgcctacaagaaccaggaccacggggcctggctgcgcggcggggatgtgtggctggacagctgccggtttgctgacaatggcattggcctgaccctggccagtggtggaaccttcccgtatgacgacggctccaagcaagagataaagaacagcttgtttgttggcgagagtggcaacgtggggacggaaatgatggacaataggatctggggccctggcggcttggaccatagcggaaggaccctccctataggccagaattttccaattagaggaattcagttatatgatggccccatcaacatccaaaactgcactttccgaaagtttgtggccctggagggccggcacaccagcgccctggccttccgcctgaataatgcctggcagagctgcccccataacaacgtgaccggcattgcctttgaggacgttccgattacttccagagtgttcttcggagagcctgggccctggttcaaccagctggacatggatggggataagacatctgtgttccatgacgtcgacggctccgtgtccgagtaccctggctcctacctcacgaagaatgacaactggctggtccggcacccagactgcatcaatgttcccgactggagaggggccatttgcagtgggtgctatgcacagatgtacattcaagcctacaagaccagtaacctgcgaatgaagatcatcaagaatgacttccccagccaccctctttacctggagggggcgctcaccaggagcacccattaccagcaataccaaccggttgtcaccctgcagaagggctacaccatccactgggaccagacggcccccgccgaactcgccatctggctcatcaacttcaacaagggcgactggatccgagtggggctctgctacccgcgaggcaccacattctccatcctctcggatgttcacaatcgcctgctgaagcaaacgtccaagacgggcgtcttcgtgaggaccttgcagatggacaaagtggagcagagctaccctggcaggagccactactactgggacgaggactcagggctgttgttcctgaagctgaaagctcagaacgagagagagaagtttgctttctgctccatgaaaggctgtgagaggataaagattaaagctctgattccaaagaacgcaggcgtcagtgactgcacagccacagcttaccccaagttcaccgagagggctgtcgtagacgtgccgatgcccaagaagctctttggttctcagctgaaaacaaaggaccatttcttggaggtgaagatggagagttccaagcagcacttcttccacctctggaacgacttcgcttacattgaagtggatgggaagaagtaccccagttcggaggatggcatccaggtggtggtgattgacgggaaccaagggcgcgtggtgagccacacgagcttcaggaactccattctgcaaggcataccatggcagcttttcaactatgtggcgaccatccctgacaattccatagtgcttatggcatcaaagggaagatacgtctccagaggcccatggaccagagtgctggaaaagcttggggcagacaggggtctcaagttgaaagagcaaatggcattcgttggcttcaaaggcagcttccggcccatctgggtgacactggacactgaggatcacaaagccaaaatcttccaagttgtgcccatccctgtggtgaagaagaagaagttgtgaggacagctgccgcccggtgccacctcgtggtagactatgacggtgactcttggcagcagaccagtgggggatggctgggtcccccagcccctgccagcagctgcctgggaaggccgtgtttcagccctgatgggccaagggaaggctatcagagaccctggtgctgccacctgcccctactcaagtgtctacctggagcccctggggcggtgctggccaatgctggaaacattcactttcctgcagcctcttgggtgcttctctcctatctgtgcctcttcagtgggggtttggggaccatatcaggagacctgggttgtgctgacagcaaagatccactttggcaggagccctgacccagctaggaggtagtctggagggctggtcattcacagatccccatggtcttcagcagacaagtgagggtggtaaatgtaggagaaagagccttggccttaaggaaatctttactcctgtaagcaagagccaacctcacaggattaggagctggggtagaactggctatccttggggaagaggcaagccctgcctctggccgtgtccacctttcaggagactttgagtggcaggtttggacttggactagatgactctcaaaggcccttttagttctgagattccagaaatctgctgcatttcacatggtacctggaacccaacagttcatggatatccactgatatccatgatgctgggtgccccagcgcacacgggatggagaggtgagaactaatgcctagcttgaggggtctgcagtccagtagggcaggcagtcaggtccatgtgcactgcaatgccaggtggagaaatcacagagaggtaaaatggaggccagtgccatttcagaggggaggctcaggaaggcttcttgcttacaggaatgaaggctgggggcattttgctggggggagatgaggcagcctctggaatggctcagggattcagccctccctgccgctgcctgctgaagctggtgactacggggtcgccctttgctcacgtctctctggcccactcatgatggagaagtgtggtcagaggggagcaatgggctttgctgcttatgagcacagaggaattcagtccccaggcagccctgcctctgactccaagagggtgaagtccacagaagtgagctcctgccttagggcctcatttgctcttcatccagggaactgagcacagggggcctccaggagaccctagatgtgctcgtactccctcggcctgggatttcagagctggaaatatagaaaatatctagcccaaagccttcattttaacagatggggaaagtgagcccccaagatgggaaagaaccacacagctaagggagggcctggggagccccaccctagcccttgctgccacaccacattgcctcaacaaccggccccagagtgcccaggcactcctgaggtagcttctggaaatggggacaagtcccctcgaaggaaaggaaatgactagagtagaatgacagctagcagatctcttccctcctgctcccagcgcacacaaacccgccctccccttggtgttggcggtccctgtggccttcactttgttcactacctgtcagcccagcctgggtgcacagtagctgcaactccccattggtgctacctggctctcctgtctctgcagctctacaggtgaggcccagcagagggagtagggctcgccatgtttctggtgagccaatttggctgatcttgggtgtctgaacagctattgggtccaccccagtccctttcagctgctgcttaatgccctgctctctccctggcccaccttatagagagcccaaagagctcctgtaagagggagaactctatctgtggtttataatcttgcacgaggcaccagagtctccctgggtcttgtgatgaactacatttatcccctttcctgccccaaccacaaactctttccttcaaagagggcctgcctggctccctccacccaactgcacccatgagactcggtccaagagtccattccccaggtgggagccaactgtcagggaggtctttcccaccaaacatctttcagctgctgggaggtgaccatagggctctgcttttaaagatatggctgcttcaaaggccagagtcacaggaaggacttcttccagggagattagtggtgatggagaggagagttaaaatgacctcatgtccttcttgtccacggttttgttgagttttcactcttctaatgcaagggtctcacactgtgaaccacttaggatgtgatcactttcaggtggccaggaatgttgaatgtctttggctcagttcatttaaaaaagatatctatttgaaagttctcagagttgtacatatgtttcacagtacaggatctgtacataaaagtttctttcctaaaccattcaccaagagccaatatctaggcattttcttggtagcacaaattttcttattgcttagaaaattgtcctccttgttatttctgtttgtaagacttaagtgagttaggtctttaaggaaagcaacgctcctctgaaatgcttgtcttttttctgttgccgaaatagctggtcctttttcgggagttagatgtatagagtgtttgtatgtaaacatttcttgtaggcatcaccatgaacaaagatatattttctatttatttattatatgtgcacttcaagaagtcactgtcagagaaataaagaattgtcttaaatgtcatg

SEQ ID NO: 930 - DNA, 6259 bp, Homo sapiens
ttagaatcacctggacaacttttcaaagtccagatgtccatgctgcaccccagacacaatcaaatctgaggctccgaggatggggactgggcatgagtattttttaaagactcctccccatgggatgcagaaccatgtttggactgttggccgctgttcatggtgctggtagtggtggtgcaaattgtaaaaagtggccagcccagatcctagaagagtggctacttattgtaaatgctccgtaaaatgttcacccagccataagcagtagatcactggtttcgatactgagtactgtaggacctcaggccaggcatttatctattccaagactttaggctgtctttctcataacaaaactgatgggggcaatcattgggataatcatctcgggccgttgtaaatagtgttgcagcagggacaattttagacttctgagtatatgtttagaacattaatcagcaccttccttctctataaaaaaaaaacgactttgctctgtaatttctgtgtcattcccaggccactacaatggatggagttaacctcagcaccgaggttgtctacaaaaaaggccaggattataggtttgcttgctacgaccggggcagagcctgccggagctaccgtgtacggttcctctgtgggaagcctgtgaggcccaaactcacagtcaccattgacaccaatgtgaacagcaccattctgaacttggaggataatgtacagtcatggaaacctggagataccctggtcattgccagtactgattactccatgtaccaggcagaagagttccaggtgcttccctgcagatcctgcgcccccaaccaggtcaaagtggcagggaaaccaatgtacctgcacatcggggaggagatagacggcgtggacatgcgggcggaggttgggcttctgagccggaacatcatagtgatgggggagatggaggacaaatgctacccctacagaaaccacatctgcaatttctttgacttcgatacctttgggggccacatcaagtttgctctgggatttaaggcagcacacttggagggcacggagctgaagcatatgggacagcagctggtgggtcagtacccgattcacttccacctggccggtgatgtagacgaaaggggaggttatgacccacccacatacatcagggacctctccatccatcatacattctctcgctgcgtcacagtccatggctccaatggcttgttgatcaaggacgttgtgggctataactctttgggccactgcttcttcacggaagatgggccggaggaacgcaacacttttgaccactgtcttggcctccttgtcaagtctggaaccctcctcccctcggaccgtgacagcaagatgtgcaagatgatcacagaggactcctacccagggtacatccccaagcccaggcaagactgcaatgctgtgtccaccttctggatggccaatcccaacaacaacctcatcaactgtgccgctgcaggatctgaggaaactggattttggtttatttttcaccacgtaccaacgggcccctccgtgggaatgtactccccaggttattcagagcacattccactgggaaaattctataacaaccgagcacattccaactaccgggctggcatgatcatagacaacggagtcaaaaccaccgaggcctctgccaaggacaagcggccgttcctctcaatcatctctgccagatacagccctcaccaggacgccgacccgctgaagccccgggagccggccatcatcagacacttcattgcctacaagaaccaggaccacggggcctggctgcgcggcggggatgtgtggctggacagctgccggtttgctgacaatggcattggcctgaccctggccagtggtggaaccttcccgtatgacgacggctccaagcaagagataaagaacagcttgtttgttggcgagagtggcaacgtggggacggaaatgatggacaataggatctggggccctggcggcttggaccatagcggaaggaccctccctataggccagaattttccaattagaggaattcagttatatgatggccccatcaacatccaaaactgcactttccgaaagtttgtggccctggagggccggcacaccagcgccctggccttccgcctgaataatgcctggcagagctgcccccataacaacgtgaccggcattgcctttgaggacgttccgattacttccagagtgttcttcggagagcctgggccctggttcaaccagctggacatggatggggataagacatctgtgttccatgacgtcgacggctccgtgtccgagtaccctggctcctacctcacgaagaatgacaactggctggtccggcacccagactgcatcaatgttcccgactggagaggggccatttgcagtgggtgctatgcacagatgtacattcaagcctacaagaccagtaacctgcgaatgaagatcatcaagaatgacttccccagccaccctctttacctggagggggcgctcaccaggagcacccattaccagcaataccaaccggttgtcaccctgcagaagggctacaccatccactgggaccagacggcccccgccgaactcgccatctggctcatcaacttcaacaagggcgactggatccgagtggggctctgctacccgcgaggcaccacattctccatcctctcggatgttcacaatcgcctgctgaagcaaacgtccaagacgggcgtcttcgtgaggaccttgcagatggacaaagtggagcagagctaccctggcaggagccactactactgggacgaggactcagggctgttgttcctgaagctgaaagctcagaacgagagagagaagtttgctttctgctccatgaaaggctgtgagaggataaagattaaagctctgattccaaagaacgcaggcgtcagtgactgcacagccacagcttaccccaagttcaccgagagggctgtcgtagacgtgccgatgcccaagaagctctttggttctcagctgaaaacaaaggaccatttcttggaggtgaagatggagagttccaagcagcacttcttccacctctggaacgacttcgcttacattgaagtggatgggaagaagtaccccagttcggaggatggcatccaggtggtggtgattgacgggaaccaagggcgcgtggtgagccacacgagcttcaggaactccattctgcaaggcataccatggcagcttttcaactatgtggcgaccatccctgacaattccatagtgcttatggcatcaaagggaagatacgtctccagaggcccatggaccagagtgctggaaaagcttggggcagacaggggtctcaagttgaaagagcaaatggcattcgttggcttcaaaggcagcttccggcccatctgggtgacactggacactgaggatcacaaagccaaaatcttccaagttgtgcccatccctgtggtgaagaagaagaagttgtgaggacagctgccgcccggtgccacctcgtggtagactatgacggtgactcttggcagcagaccagtgggggatggctgggtcccccagcccctgccagcagctgcctgggaaggccgtgtttcagccctgatgggccaagggaaggctatcagagaccctggtgctgccacctgcccctactcaagtgtctacctggagcccctggggcggtgctggccaatgctggaaacattcactttcctgcagcctcttgggtgcttctctcctatctgtgcctcttcagtgggggtttggggaccatatcaggagacctgggttgtgctgacagcaaagatccactttggcaggagccctgacccagctaggaggtagtctggagggctggtcattcacagatccccatggtcttcagcagacaagtgagggtggtaaatgtaggagaaagagccttggccttaaggaaatctttactcctgtaagcaagagccaacctcacaggattaggagctggggtagaactggctatccttggggaagaggcaagccctgcctctggccgtgtccacctttcaggagactttgagtggcaggtttggacttggactagatgactctcaaaggcccttttagttctgagattccagaaatctgctgcatttcacatggtacctggaacccaacagttcatggatatccactgatatccatgatgctgggtgccccagcgcacacgggatggagaggtgagaactaatgcctagcttgaggggtctgcagtccagtagggcaggcagtcaggtccatgtgcactgcaatgccaggtggagaaatcacagagaggtaaaatggaggccagtgccatttcagaggggaggctcaggaaggcttcttgcttacaggaatgaaggctgggggcattttgctggggggagatgaggcagcctctggaatggctcagggattcagccctccctgccgctgcctgctgaagctggtgactacggggtcgccctttgctcacgtctctctggcccactcatgatggagaagtgtggtcagaggggagcaatgggctttgctgcttatgagcacagaggaattcagtccccaggcagccctgcctctgactccaagagggtgaagtccacagaagtgagctcctgccttagggcctcatttgctcttcatccagggaactgagcacagggggcctccaggagaccctagatgtgctcgtactccctcggcctgggatttcagagctggaaatatagaaaatatctagcccaaagccttcattttaacagatggggaaagtgagcccccaagatgggaaagaaccacacagctaagggagggcctggggagccccaccctagcccttgctgccacaccacattgcctcaacaaccggccccagagtgcccaggcactcctgaggtagcttctggaaatggggacaagtcccctcgaaggaaaggaaatgactagagtagaatgacagctagcagatctcttccctcctgctcccagcgcacacaaacccgccctccccttggtgttggcggtccctgtggccttcactttgttcactacctgtcagcccagcctgggtgcacagtagctgcaactccccattggtgctacctggctctcctgtctctgcagctctacaggtgaggcccagcagagggagtagggctcgccatgtttctggtgagccaatttggctgatcttgggtgtctgaacagctattgggtccaccccagtccctttcagctgctgcttaatgccctgctctctccctggcccaccttatagagagcccaaagagctcctgtaagagggagaactctatctgtggtttataatcttgcacgaggcaccagagtctccctgggtcttgtgatgaactacatttatcccctttcctgccccaaccacaaactctttccttcaaagagggcctgcctggctccctccacccaactgcacccatgagactcggtccaagagtccattccccaggtgggagccaactgtcagggaggtctttcccaccaaacatctttcagctgctgggaggtgaccatagggctctgcttttaaagatatggctgcttcaaaggccagagtcacaggaaggacttcttccagggagattagtggtgatggagaggagagttaaaatgacctcatgtccttcttgtccacggttttgttgagttttcactcttctaatgcaagggtctcacactgtgaaccacttaggatgtgatcactttcaggtggccaggaatgttgaatgtctttggctcagttcatttaaaaaagatatctatttgaaagttctcagagttgtacatatgtttcacagtacaggatctgtacataaaagtttctttcctaaaccattcaccaagagccaatatctaggcattttcttggtagcacaaattttcttattgcttagaaaattgtcctccttgttatttctgtttgtaagacttaagtgagttaggtctttaaggaaagcaacgctcctctgaaatgcttgtcttttttctgttgccgaaatagctggtcctttttcgggagttagatgtatagagtgtttgtatgtaaacatttcttgtaggcatcaccatgaacaaagatatattttctatttatttattatatgtgcacttcaagaagtcactgtcagagaaataaagaattgtcttaaatgtcatg

SEQ ID NO: 931 - DNA, 6882 bp, Homo sapiens
gggggagctagcgctcaagcagagcccagcgcggtgctatcggacagagcctggcgagcgcaagcggcgcggggagccagcggggctgagcgcggccagggtctgaacccagatttcccagactagctaccactccgcttgcccacgccccgggagctcgcggcgcctggcggtcagcgaccagacgtccggggccgctgcgctcctggcccgcgaggcgtgacactgtctcggctacagacccagagggagcacactgccaggatgggagctgctgggaggcaggacttcctcttcaaggccatgctgaccatcagctggctcactctgacctgcttccctggggccacatccacagtggctgctgggtgccctgaccagagccctgagttgcaaccctggaaccctggccatgaccaagaccaccatgtgcatatcggccagggcaagacactgctgctcacctcttctgccacggtctattccatccacatctcagagggaggcaagctggtcattaaagaccacgacgagccgattgttttgcgaacccggcacatcctgattgacaacggaggagagctgcatgctgggagtgccctctgccctttccagggcaatttcaccatcattttgtatggaagggctgatgaaggtattcagccggatccttactatggtctgaagtacattggggttggtaaaggaggcgctcttgagttgcatggacagaaaaagctctcctggacatttctgaacaagacccttcacccaggtggcatggcagaaggaggctatttttttgaaaggagctggggccaccgtggagttattgttcatgtcatcgaccccaaatcaggcacagtcatccattctgaccggtttgacacctatagatccaagaaagagagtgaacgtctggtccagtatttgaacgcggtgcccgatggcaggatcctttctgttgcagtgaatgatgaaggttctcgaaatctggatgacatggccaggaaggcgatgaccaaattgggaagcaaacacttcctgcaccttggatttagacacccttggagttttctaactgtgaaaggaaatccatcatcttcagtggaagaccatattgaatatcatggacatcgaggctctgctgctgcccgggtattcaaattgttccagacagagcatggcgaatatttcaatgtttctttgtccagtgagtgggttcaagacgtggagtggacggagtggttcgatcatgataaagtatctcagactaaaggtggggagaaaatttcagacctctggaaagctcacccaggaaaaatatgcaatcgtcccattgatatacaggccactacaatggatggagttaacctcagcaccgaggttgtctacaaaaaaggccaggattataggtttgcttgctacgaccggggcagagcctgccggagctaccgtgtacggttcctctgtgggaagcctgtgaggcccaaactcacagtcaccattgacaccaatgtgaacagcaccattctgaacttggaggataatgtacagtcatggaaacctggagataccctggtcattgccagtactgattactccatgtaccaggcagaagagttccaggtgcttccctgcagatcctgcgcccccaaccaggtcaaagtggcagggaaaccaatgtacctgcacatcggggaggagatagacggcgtggacatgcgggcggaggttgggcttctgagccggaacatcatagtgatgggggagatggaggacaaatgctacccctacagaaaccacatctgcaatttctttgacttcgatacctttgggggccacatcaagtttgctctgggatttaaggcagcacacttggagggcacggagctgaagcatatgggacagcagctggtgggtcagtacccgattcacttccacctggccggtgatgtagacgaaaggggaggttatgacccacccacatacatcagggacctctccatccatcatacattctctcgctgcgtcacagtccatggctccaatggcttgttgatcaaggacgttgtgggctataactctttgggccactgcttcttcacggaagatgggccggaggaacgcaacacttttgaccactgtcttggcctccttgtcaagtctggaaccctcctcccctcggaccgtgacagcaagatgtgcaagatgatcacagaggactcctacccagggtacatccccaagcccaggcaagactgcaatgctgtgtccaccttctggatggccaatcccaacaacaacctcatcaactgtgccgctgcaggatctgaggaaactggattttggtttatttttcaccacgtaccaacgggcccctccgtgggaatgtactccccaggttattcagagcacattccactgggaaaattctataacaaccgagcacattccaactaccgggctggcatgatcatagacaacggagtcaaaaccaccgaggcctctgccaaggacaagcggccgttcctctcaatcatctctgccagatacagccctcaccaggacgccgacccgctgaagccccgggagccggccatcatcagacacttcattgcctacaagaaccaggaccacggggcctggctgcgcggcggggatgtgtggctggacagctgccggtttgctgacaatggcattggcctgaccctggccagtggtggaaccttcccgtatgacgacggctccaagcaagagataaagaacagcttgtttgttggcgagagtggcaacgtggggacggaaatgatggacaataggatctggggccctggcggcttggaccatagcggaaggaccctccctataggccagaattttccaattagaggaattcagttatatgatggccccatcaacatccaaaactgcactttccgaaagtttgtggccctggagggccggcacaccagcgccctggccttccgcctgaataatgcctggcagagctgcccccataacaacgtgaccggcattgcctttgaggacgttccgattacttccagagtgttcttcggagagcctgggccctggttcaaccagctggacatggatggggataagacatctgtgttccatgacgtcgacggctccgtgtccgagtaccctggctcctacctcacgaagaatgacaactggctggtccggcacccagactgcatcaatgttcccgactggagaggggccatttgcagtgggtgctatgcacagatgtacattcaagcctacaagaccagtaacctgcgaatgaagatcatcaagaatgacttccccagccaccctctttacctggagggggcgctcaccaggagcacccattaccagcaataccaaccggttgtcaccctgcagaagggctacaccatccactgggaccagacggcccccgccgaactcgccatctggctcatcaacttcaacaagggcgactggatccgagtggggctctgctacccgcgaggcaccacattctccatcctctcggatgttcacaatcgcctgctgaagcaaacgtccaagacgggcgtcttcgtgaggaccttgcagatggacaaagtggagcagagctaccctggcaggagccactactactgggacgaggactcaggaaaacaaaggaccatttcttggaggtgaagatggagagttccaagcagcacttcttccacctctggaacgacttcgcttacattgaagtggatgggaagaagtaccccagttcggaggatggcatccaggtggtggtgattgacgggaaccaagggcgcgtggtgagccacacgagcttcaggaactccattctgcaaggcataccatggcagcttttcaactatgtggcgaccatccctgacaattccatagtgcttatggcatcaaagggaagatacgtctccagaggcccatggaccagagtgctggaaaagcttggggcagacaggggtctcaagttgaaagagcaaatggcattcgttggcttcaaaggcagcttccggcccatctgggtgacactggacactgaggatcacaaagccaaaatcttccaagttgtgcccatccctgtggtgaagaagaagaagttgtgaggacagctgccgcccggtgccacctcgtggtagactatgacggtgactcttggcagcagaccagtgggggatggctgggtcccccagcccctgccagcagctgcctgggaaggccgtgtttcagccctgatgggccaagggaaggctatcagagaccctggtgctgccacctgcccctactcaagtgtctacctggagcccctggggcggtgctggccaatgctggaaacattcactttcctgcagcctcttgggtgcttctctcctatctgtgcctcttcagtgggggtttggggaccatatcaggagacctgggttgtgctgacagcaaagatccactttggcaggagccctgacccagctaggaggtagtctggagggctggtcattcacagatccccatggtcttcagcagacaagtgagggtggtaaatgtaggagaaagagccttggccttaaggaaatctttactcctgtaagcaagagccaacctcacaggattaggagctggggtagaactggctatccttggggaagaggcaagccctgcctctggccgtgtccacctttcaggagactttgagtggcaggtttggacttggactagatgactctcaaaggcccttttagttctgagattccagaaatctgctgcatttcacatggtacctggaacccaacagttcatggatatccactgatatccatgatgctgggtgccccagcgcacacgggatggagaggtgagaactaatgcctagcttgaggggtctgcagtccagtagggcaggcagtcaggtccatgtgcactgcaatgccaggtggagaaatcacagagaggtaaaatggaggccagtgccatttcagaggggaggctcaggaaggcttcttgcttacaggaatgaaggctgggggcattttgctggggggagatgaggcagcctctggaatggctcagggattcagccctccctgccgctgcctgctgaagctggtgactacggggtcgccctttgctcacgtctctctggcccactcatgatggagaagtgtggtcagaggggagcaatgggctttgctgcttatgagcacagaggaattcagtccccaggcagccctgcctctgactccaagagggtgaagtccacagaagtgagctcctgccttagggcctcatttgctcttcatccagggaactgagcacagggggcctccaggagaccctagatgtgctcgtactccctcggcctgggatttcagagctggaaatatagaaaatatctagcccaaagccttcattttaacagatggggaaagtgagcccccaagatgggaaagaaccacacagctaagggagggcctggggagccccaccctagcccttgctgccacaccacattgcctcaacaaccggccccagagtgcccaggcactcctgaggtagcttctggaaatggggacaagtcccctcgaaggaaaggaaatgactagagtagaatgacagctagcagatctcttccctcctgctcccagcgcacacaaacccgccctccccttggtgttggcggtccctgtggccttcactttgttcactacctgtcagcccagcctgggtgcacagtagctgcaactccccattggtgctacctggctctcctgtctctgcagctctacaggtgaggcccagcagagggagtagggctcgccatgtttctggtgagccaatttggctgatcttgggtgtctgaacagctattgggtccaccccagtccctttcagctgctgcttaatgccctgctctctccctggcccaccttatagagagcccaaagagctcctgtaagagggagaactctatctgtggtttataatcttgcacgaggcaccagagtctccctgggtcttgtgatgaactacatttatcccctttcctgccccaaccacaaactctttccttcaaagagggcctgcctggctccctccacccaactgcacccatgagactcggtccaagagtccattccccaggtgggagccaactgtcagggaggtctttcccaccaaacatctttcagctgctgggaggtgaccatagggctctgcttttaaagatatggctgcttcaaaggccagagtcacaggaaggacttcttccagggagattagtggtgatggagaggagagttaaaatgacctcatgtccttcttgtccacggttttgttgagttttcactcttctaatgcaagggtctcacactgtgaaccacttaggatgtgatcactttcaggtggccaggaatgttgaatgtctttggctcagttcatttaaaaaagatatctatttgaaagttctcagagttgtacatatgtttcacagtacaggatctgtacataaaagtttctttcctaaaccattcaccaagagccaatatctaggcattttcttggtagcacaaattttcttattgcttagaaaattgtcctccttgttatttctgtttgtaagacttaagtgagttaggtctttaaggaaagcaacgctcctctgaaatgcttgtcttttttctgttgccgaaatagctggtcctttttcgggagttagatgtatagagtgtttgtatgtaaacatttcttgtaggcatcaccatgaacaaagatatattttctatttatttattatatgtgcacttcaagaagtcactgtcagagaaataaagaattgtcttaaatgtcatg

SEQ ID NO: 932 - DNA, 2818 bp, Homo sapiens
gggggagctagcgctcaagcagagcccagcgcggtgctatcggacagagcctggcgagcgcaagcggcgcggggagccagcggggctgagcgcggccagggtctgaacccagatttcccagactagctaccactccgcttgcccacgccccgggagctcgcggcgcctggcggtcagcgaccagacgtccggggccgctgcgctcctggcccgcgaggcgtgacactgtctcggctacagacccagaggtaagagggcctggctgggggcgtcagggatgagctgacggcccatgccacggaagagaggtaagaagtgggggcccgcgcctccacccggcacagggtaaacgttacccgcctcagtttctgtttgtctgtccaccctgtgctgtgcagtctacctctatctgtctgtttgtccatgcgtctgttgatgggcacacgctcttggcactgtcctctgtgggatttctctgagatcttgtgatgctttacaagctgcaggtgccggggggcgctggagtccccagagggcatccagagggggcagactcctgctttccgtagattttcccccttctgaatggcaccgggggcttgcgcccgggagagtgtctcgccgaggagggagtaccacaagggtcaggtctcggtgtcctgccgactgggagccagctcacgccgagctctagcgggcgtgcgcctagcaacaggtctgcgccctgctgctcctgcctcagcacgctcttcctcccagtttccctcgcctcccagtgcctccgggacagcgctaggcacccagcgacgcgctggcgcggggccgagctgaggcaattgcaatgttagatgaacccggggggctctgctgatgtttagactgagactccaaacgtggcatcgctggaagaaggtctggtggtccctggcaaaggacgtcggctccaagaaaggtcgcgttaggttgtgaggaaaggcagagagtcctggcagaacgctggccaggtctccagctcgccgctctgggaacgaaggccagtgacattctggaatggaccccaagggatgcgtgtgctcatgagagaggagcgctgtgcgccctgggtcctcagccgcagacactctctgcgacagccgctgttccccaagggtcggacgctacggcagtcccaggagttccgccagctgccgggtttgaggtcctgagtccttctccaagcagccaacgctacccacagggactccatcttcactttatttttgcatccgagaacttgttgatggaattgatgaaaatgctggagttgatcacaatgaaaaaaaaattcttatttaaagacaaatggaagaacttttatgtgataaaaatcggtcaactgttttcccctacctacactacttggaggaaagataaaactcagaaggaatcttagcttcttccgtctaaaaggattggagctgaagaatacatgctacagatgctcagaatctttctatgagactgctggtgacatgaacagagcaggaggacatggggccttggatgaccttgaattcctggctgtcttctgtggactcccatgcagattccagtttccagcatacccatggctttctgatggagaaggtcagtgaagccgcatcacttatgcagctccaggtgggggtcactcggctcaaggtggtggagttggaactcagacctatgtcaccaggctgctaggctctggggatgcagcagtgaccaaaatgagctgagacctgcctgcatggagattacagtctagagcagtgctgtccaggagacatacaatgggtgccacatttggaattctgagttttctagtagccccactaagacaaagtttaaaaagaaacaggtgacaagccctggactccggtgcggctgggcctggggctacctgaagggagagcagagactcaggtgcccggtgagcaatggcagtgaggagaagcagagagcaacgccagcaagcaacgcctcctgcccctgcttttgctcttgtgtctcttgaccctgtgaggtccagcaaccatggggactgagcagcagttggacttgggggcagccgagcttctggaaaattttagcttgttattgtgaagacttgtggaatatcccaaagtgctggctttcggaaaagggtgcctacattttcttctgcacaggctctgctgaaggagtttgctgcactcttgaaaggacaggcaagctcaggtcctcatggctcgatctctgagcaggcctctaacccagtgaggacagcggtcaaccagtctccagctaacagcttcctgcagagacttccagcattgttagctaacatgcactcttctgaggccttcaacagctggaaactgtttcaggactatcttgccagctaagaagcggaatcccagttcttgttgccaggaagcttttaatggccaatggagaatgctgtcctcccttggtgaaagaattcccaaggaaatttgggaatcttttaggattcacttcaatggaatgtttcttgggacatgtgtcttcaggcactggaagccactcacggacaagaaggcacggatgaccccttgctcagcaatgtgggattagcctctttgggcagggcaatctctctgcccccagtggcttagacagctggctctgagacatagcagaaggtctcacaaatgttaggaaaagggggttgagcattattcctccatgtggaattatttttgtatttatccagaaagtgactcttttttggtctttgaaatcatctgtgatataattagaagatgtcagagcttca

SEQ ID NO: 933 - DNA, 2651 bp, Homo sapiens
gggggagctagcgctcaagcagagcccagcgcggtgctatcggacagagcctggcgagcgcaagcggcgcggggagccagcggggctgagcgcggccagggtctgaacccagatttcccagactagctaccactccgcttgcccacgccccgggagctcgcggcgcctggcggtcagcgaccagacgtccggggccgctgcgctcctggcccgcgaggcgtgacactgtctcggctacagacccagaggtaagagggcctggctgggggcgtcagggatgagctgacggcccatgccacggaagagaggtaagaagtgggggcccgcgcctccacccggcacagggtaaacgttacccgcctcagtttctgtttgtctgtccaccctgtgctgtgcagtctacctctatctgtctgtttgtccatgcgtctgttgatgggcacacgctcttggcactgtcctctgtgggatttctctgagatcttgtgatgctttacaagctgcaggtgccggggggcgctggagtccccagagggcatccagagggggcagactcctgctttccgtagattttcccccttctgaatggcaccgggggcttgcgcccgggagagtgtctcgccgaggagggagtaccacaagggtcaggtctcggtgtcctgccgactgggagccagctcacgccgagctctagcgggcgtgcgcctagcaacaggtctgcgccctgctgctcctgcctcagcacgctcttcctcccagtttccctcgcctcccagtgcctccgggacagcgctaggcacccagcgacgcgctggcgcggggccgagctgaggcaattgcaatgttagatgaacccggggggctctgctgatgtttagactgagactccaaacgtggcatcgctggaagaaggtctggtggtccctggcaaaggacgtcggctccaagaaaggtcgcgttaggttgtgaggaaaggcagagagtcctggcagaacgctggccaggtctccagctcgccgctctgggaacgaaggccagtgacattctggaatggaccccaagggatgcgtgtgctcatgagagaggagcgctgtgcgccctgggtcctcagccgcagacactctctgcgacagccgctgttccccaagggtcggacgctacggcagtcccaggagttccgccagctgccgggtttgaggtcctgagtccttctccaagcagccaacgctacccacagggactccatcttcactttatttttgcatccgagaacttgttgatggaattgatgaaaatgctggagttgatcacaatgaaaaaaaaattcttatttaaagacaaatggaagaacttttatgtgataaaaatcggtcaactgttttcccctacctacactacttggaggaaagataaaactcagaaggaatcttagcttcttccgtctaaaaggattggagctgaagaatacatgctacagatgctcagaatctttctatgagactgctggtgacatgaacagagcaggaggacatggggccttggatgaccttgaattcctggctgtcttctgtggactcccatgcagattccagtttccagcatacccatggctttctgatggagaaggtcagtgaagccgcatcacttatgcagctccaggtgggggtcactcggctcaaggtggtggagttggaactcagacctatgtcaccgtgacaagccctggactccggtgcggctgggcctggggctacctgaagggagagcagagactcaggtgcccggtgagcaatggcagtgaggagaagcagagagcaacgccagcaagcaacgcctcctgcccctgcttttgctcttgtgtctcttgaccctgtgaggtccagcaaccatggggactgagcagcagttggacttgggggcagccgagcttctggaaaattttagcttgttattgtgaagacttgtggaatatcccaaagtgctggctttcggaaaagggtgcctacattttcttctgcacaggctctgctgaaggagtttgctgcactcttgaaaggacaggcaagctcaggtcctcatggctcgatctctgagcaggcctctaacccagtgaggacagcggtcaaccagtctccagctaacagcttcctgcagagacttccagcattgttagctaacatgcactcttctgaggccttcaacagctggaaactgtttcaggactatcttgccagctaagaagcggaatcccagttcttgttgccaggaagcttttaatggccaatggagaatgctgtcctcccttggtgaaagaattcccaaggaaatttgggaatcttttaggattcacttcaatggaatgtttcttgggacatgtgtcttcaggcactggaagccactcacggacaagaaggcacggatgaccccttgctcagcaatgtgggattagcctctttgggcagggcaatctctctgcccccagtggcttagacagctggctctgagacatagcagaaggtctcacaaatgttaggaaaagggggttgagcattattcctccatgtggaattatttttgtatttatccagaaagtgactcttttttggtctttgaaatcatctgtgatataattagaagatgtcagagcttca

SEQ ID NO: 934 - DNA, 3886 bp, Homo sapiens
gggggagctagcgctcaagcagagcccagcgcggtgctatcggacagagcctggcgagcgcaagcggcgcggggagccagcggggctgagcgcggccagggtctgaacccagatttcccagactagctaccactccgcttgcccacgccccgggagctcgcggcgcctggcggtcagcgaccagacgtccggggccgctgcgctcctggcccgcgaggcgtgacactgtctcggctacagacccagagggagcacactgccaggatgggagctgctgggaggcaggacttcctcttcaaggccatgctgaccatcagctggctcactctgacctgcttccctggggccacatccacagtggctgctgggtgccctgaccagagccctgagttgcaaccctggaaccctggccatgaccaagaccaccatgtgcatatcggccagggcaagacactgctgctcacctcttctgccacggtctattccatccacatctcagagggaggcaagctggtcattaaagaccacgacgagccgattgttttgcgaacccggcacatcctgattgacaacggaggagagctgcatgctgggagtgccctctgccctttccagggcaatttcaccatcattttgtatggaagggctgatgaaggtattcagccggatccttactatggtctgaagtacattggggttggtaaaggaggcgctcttgagttgcatggacagaaaaagctctcctggacatttctgaacaagacccttcacccaggtggcatggcagaaggaggctatttttttgaaaggagctggggccaccgtggagttattgttcatgtcatcgaccccaaatcaggcacagtcatccattctgaccggtttgacacctatagatccaagaaagagagtgaacgtctggtccagtatttgaacgcggtgcccgatggcaggatcctttctgttgcagtgaatgatgaaggttctcgaaatctggatgacatggccaggaaggcgatgaccaaattgggaagcaaacacttcctgcaccttggatttagacacccttggagttttctaactgtgaaaggaaatccatcatcttcagtggaagaccatattgaatatcatggacatcgaggctctgctgctgcccgggtattcaaattgttccagacagagcatggcgaatatttcaatgtttctttgtccagtgagtgggttcaagacgtggagtggacggagtggttcgatcatgataaagtatctcagactaaaggtggggagaaaatttcagacctctggaaagctcacccaggaaaaatatgcaatcgtcccattgatatacaggccactacaatggatggagttaacctcagcaccgaggttgtctacaaaaaaggccaggattataggtttgcttgctacgaccggggcagagcctgccggagctaccgtgtacggttcctctgtgggaagcctgtgaggcccaaactcacagtcaccattgacaccaatgtgaacagcaccattctgaacttggaggataatgtacagtcatggaaacctggagataccctggtcattgccagtactgattactccatgtaccaggcagaagagttccaggtgcttccctgcagatcctgcgcccccaaccaggtcaaagtggcagggaaaccaatgtacctgcacatcggggaggagatagacggcgtggacatgcgggcggaggttgggcttctgagccggaacatcatagtgatgggggagatggaggacaaatgctacccctacagaaaccacatctgcaatttctttgacttcgatacctttgggggccacatcaagtttgctctgggatttaaggcagcacacttggagggcacggagctgaagcatatgggacagcagctggtgggtcagtacccgattcacttccacctggccggtgatgtagacgaaaggggaggttatgacccacccacatacatcagggacctctccatccatcatacattctctcgctgcgtcacagtccatggctccaatggcttgttgatcaaggacgttgtgggctataactctttgggccactgcttcttcacggaagatgggccggaggaacgcaacacttttgaccactgtcttggcctccttgtcaagtctggaaccctcctcccctcggaccgtgacagcaagatgtgcaagatgatcacagaggactcctacccagggtacatccccaagcccaggcaagactgcaatgctgtgtccaccttctggatggccaatcccaacaacaacctcatcaactgtgccgctgcaggatctgaggaaactggattttggtttatttttcaccacgtaccaacgggcccctccgtgggaatgtactccccaggttattcagagcacattccactgggaaaattctataacaaccgagcacattccaactaccgggctggcatgatcatagacaacggagtcaaaaccaccgaggcctctgccaaggacaagcggccgttcctctcaatcatctctgccagatacagccctcaccaggacgccgacccgctgaagccccgggagccggccatcatcagacacttcattgcctacaagaaccaggaccacggggcctggctgcgcggcggggatgtgtggctggacagctgccggtttgctgacaatggcattggcctgaccctggccagtggtggaaccttcccgtatgacgacggctccaagcaagagataaagaacagcttgtttgttggcgagagtggcaacgtggggacggaaatgatggacaataggatctggggccctggcggcttggaccatagcggaaggaccctccctataggccagaattttccaattagaggaattcagttatatgatggccccatcaacatccaaaactgcactttccgaaagtttgtggccctggagggccggcacaccagcgccctggccttccgcctgaataatgcctggcagagctgcccccataacaacgtgaccggcattgcctttgaggacgttccgattacttccagagtgttcttcggagagcctgggccctggttcaaccagctggacatggatggggataagacatctgtgttccatgacgtcgacggctccgtgtccgagtaccctggctcctacctcacgaagaatgacaactggctggtccggcacccagactgcatcaatgttcccgactggagaggggccatttgcagtgggtgctatgcacagatgtacattcaagcctacaagaccagtaacctgcgaatgaagatcatcaagaatgacttccccagccaccctctttacctggagggggcgctcaccaggagcacccattaccagcaataccaaccggttgtcaccctgcagaagggctacaccatccactgggaccagacggcccccgccgaactcgccatctggctcatcaacttcaacaagggcgactggatccgagtggggctctgctacccgcgaggcaccacattctccatcctctcggatgttcacaatcgcctgctgaagcaaacgtccaagacgggcgtcttcgtgaggaccttgcagatggacaaagtggagcagagctaccctggcaggagccactactactgggacgaggactcagggtgagcaggcgcccacttggctgcaggaaagtggctcaacctcatcttgtccccttggcctttccaataagtctaagaacagccatgtagttaatgccaattaatgtaagacacctttctaggcattttgactctaaggctgactgtcccatacattaacgacatttttaaagctattaagctttaaaagtaaaataaacaccctattaaatata

SEQ ID NO: 935 - DNA, 2152 bp, Homo sapiens
gggggagctagcgctcaagcagagcccagcgcggtgctatcggacagagcctggcgagcgcaagcggcgcggggagccagcggggctgagcgcggccagggtctgaacccagatttcccagactagctaccactccgcttgcccacgccccgggagctcgcggcgcctggcggtcagcgaccagacgtccggggccgctgcgctcctggcccgcgaggcgtgacactgtctcggctacagacccagaggtaagagggcctggctgggggcgtcagggatgagctgacggcccatgccacggaagagaggtaagaagtgggggcccgcgcctccacccggcacagggtaaacgttacccgcctcagtttctgtttgtctgtccaccctgtgctgtgcagtctacctctatctgtctgtttgtccatgcgtctgttgatgggcacacgctcttggcactgtcctctgtgggatttctctgagatcttgtgatgctttacaagctgcaggtgccggggggcgctggagtccccagagggcatccagagggggcagactcctgctttccgtagattttcccccttctgaatggcaccgggggcttgcgcccgggagagtgtctcgccgaggagggagtaccacaagggtcaggtctcggtgtcctgccgactgggagccagctcacgccgagctctagcgggcgtgcgcctagcaacaggtctgcgccctgctgctcctgcctcagcacgctcttcctcccagtttccctcgcctcccagtgcctccgggacagcgctaggcacccagcgacgcgctggcgcggggccgagctgaggcaattgcaatgttagatgaacccggggggctctgctgatgtttagactgagactccaaacgtggcatcgctggaagaaggtctggtggtccctggcaaaggacgtcggctccaagaaaggtcgcgttaggttgtgaggaaaggcagagagtcctggcagaacgctggccaggtctccagctcgccgctctgggaacgaaggccagtgacattctggaatggaccccaagggatgcgtgtgctcatgagagaggagcgctgtgcgccctgggtcctcagccgcagacactctctgcgacagccgctgttccccaagggtcggacgctacggcagtcccaggagttccgccagctgccgggtttgaggtcctgagtccttctccaagcagccaacgctacccacagggactccatcttcactttatttttgcatccgagaacttgttgatggaattgatgaaaatgctggagttgatcacaatgaaaaaaaaattcttatttaaagacaaatggaagaacttttatgtgataaaaatcggtcaactgttttcccctacctacactacttggaggaaagataaaactcagaaggaatcttagcttcttccgtctaaaaggattggagctgaagaatacatgctacagatgctcagaatctttctatgagactgctggtgacatgaacagagcaggaggacatggggccttggatgaccttgaattcctggctgtcttctgtggactcccatgcagattccagtttccagcatacccatggctttctgatggagaaggtcagtgaagccgcatcacttatgcagctccaggtgggggtcactcggctcaaggtggtggagttggaactcagacctatgtcaccgtgagtccaaaagctcttcataataactaatgttgctcaaatcttgacttttgaaaaaacatgttgaggggaatattagaattcacagtagatcagactcatagaacagtattcatagagttgaattcgttgagagtaattgtaacccgaatgcactcatcattgacccgcccattctttctagatacttgggtttcagagatgactccgttgcatttccctgcaatggaaaagctcacagtttagttgaggagacagacatacattcaactacctacaatccatgctgtaacagaggcataaacaaagcaatatggaagcactacaaagtgatggtaaactactttgctggggaaagagacaaggtaacatggaggaagtgatatttgattgggccttaaagaaaagtacaatttctcccaggccagagaatggagggt

SEQ ID NO: 936 - DNA, 1829 bp, Homo sapiens
gggggagctagcgctcaagcagagcccagcgcggtgctatcggacagagcctggcgagcgcaagcggcgcggggagccagcggggctgagcgcggccagggtctgaacccagatttcccagactagctaccactccgcttgcccacgccccgggagctcgcggcgcctggcggtcagcgaccagacgtccggggccgctgcgctcctggcccgcgaggcgtgacactgtctcggctacagacccagagggagcacactgccaggatgggagctgctgggaggcaggacttcctcttcaaggccatgctgaccatcagctggctcactctgacctgcttccctggggccacatccacagtggctgctgggtgccctgaccagagccctgagttgcaaccctggaaccctggccatgaccaagaccaccatgtgcatatcggccagggcaagacactgctgctcacctcttctgccacggtctattccatccacatctcagagggaggcaagctggtcattaaagaccacgacgagccgattgttttgcgaacccggcacatcctgattgacaacggaggagagctgcatgctgggagtgccctctgccctttccagggcaatttcaccatcattttgtatggaagggctgatgaaggtattcagccggatccttactatggtctgaagtacattggggttggtaaaggaggcgctcttgagttgcatggacagaaaaagctctcctggacatttctgaacaagacccttcacccaggtggcatggcagaaggaggctatttttttgaaaggagctggggccaccgtggagttattgttcatgtcatcgaccccaaatcaggcacagtcatccattctgaccggtttgacacctatagatccaagaaagagagtgaacgtctggtccagtatttgaacgcggtgcccgatggcaggatcctttctgttgcagtgaatgatgaaggttctcgaaatctggatgacatggccaggaaggcgatgaccaaattgggaagcaaacacttcctgcaccttggatttagacacccttggagttttctaactgtgaaaggaaatccatcatcttcagtggaagaccatattgaatatcatggacatcgaggctctgctgctgcccgggtattcaaattgttccagacagagcatggcgaatatttcaatgtttctttgtccagtgagtgggttcaaggtgaggagtttcagacaatttggtgacacctaacagtgggatagaagaccagaaatcactgtctttgcagaactaggatttatctcttataccagtaggaccactttaatttttgcagaatcaactaaaaatgtgcaaccaaaagttgtctttaattagacaagccactttagcccatagcccagaaggatgttctcctctggctaagatttcaatttcacctcagtcagggtctgcggcattcagcttagttcacggaatatctttgatgtggcaggcaatggcactgaacaggaaatgcagataggaatagaacctgccctccaaatagcccacatgcagggattgcagaaagcagcaatcctagttgcagtccttggataacgggtttacagatggattttctttcttttctctttaatttgcttttgcaataacaaagaatataaattgcttttataaaagtaagaaactcattaagagaaactcattttttaattaaaacatgggagcataggcagattgattagagccatccatgccccagcctggtgcaaccatggacagataatattcagttcccatggtgctgaggatgctt

SEQ ID NO: 937 - DNA, 248 bp, Artificial
  Synthetic oligonucleotide
gggggagctagcgctcaagcagagcccagcgcggtgctatcggacagagcctggcgagcgcaagcggcgcggggagccagcggggctgagcgcggccagggtctgaacccagatttcccagactagctaccactccgcttgcccacgccccgggagctcgcggcgcctggcggtcagcgaccagacgtccggggccgctgcgctcctggcccgcgaggcgtgacactgtctcggctacagacccagag

SEQ ID NO: 938 - DNA, 989 bp, Artificial
  Synthetic oligonucleotide
gtaagagggcctggctgggggcgtcagggatgagctgacggcccatgccacggaagagaggtaagaagtgggggcccgcgcctccacccggcacagggtaaacgttacccgcctcagtttctgtttgtctgtccaccctgtgctgtgcagtctacctctatctgtctgtttgtccatgcgtctgttgatgggcacacgctcttggcactgtcctctgtgggatttctctgagatcttgtgatgctttacaagctgcaggtgccggggggcgctggagtccccagagggcatccagagggggcagactcctgctttccgtagattttcccccttctgaatggcaccgggggcttgcgcccgggagagtgtctcgccgaggagggagtaccacaagggtcaggtctcggtgtcctgccgactgggagccagctcacgccgagctctagcgggcgtgcgcctagcaacaggtctgcgccctgctgctcctgcctcagcacgctcttcctcccagtttccctcgcctcccagtgcctccgggacagcgctaggcacccagcgacgcgctggcgcggggccgagctgaggcaattgcaatgttagatgaacccggggggctctgctgatgtttagactgagactccaaacgtggcatcgctggaagaaggtctggtggtccctggcaaaggacgtcggctccaagaaaggtcgcgttaggttgtgaggaaaggcagagagtcctggcagaacgctggccaggtctccagctcgccgctctgggaacgaaggccagtgacattctggaatggaccccaagggatgcgtgtgctcatgagagaggagcgctgtgcgccctgggtcctcagccgcagacactctctgcgacagccgctgttccccaagggtcggacgctacggcagtcccaggagttccgccagctgccgggtttgaggtcctgagtccttctccaagcagccaacgctacccacag

SEQ ID NO: 939 - DNA, 178 bp, Artificial
  Synthetic oligonucleotide
ggactccatcttcactttatttttgcatccgagaacttgttgatggaattgatgaaaatgctggagttgatcacaatgaaaaaaaaattcttatttaaagacaaatggaagaacttttatgtgataaaaatcggtcaactgttttcccctacctacactacttggaggaaagataaaa

SEQ ID NO: 940 - DNA, 202 bp, Artificial
  Synthetic oligonucleotide
ctcagaaggaatcttagcttcttccgtctaaaaggattggagctgaagaatacatgctacagatgctcagaatctttctatgagactgctggtgacatgaacagagcaggaggacatggggccttggatgaccttgaattcctggctgtcttctgtggactcccatgcagattccagtttccagcatacccatggctttctg

SEQ ID NO: 941 - DNA, 440 bp, Artificial
  Synthetic oligonucleotide
gtgagtccaaaagctcttcataataactaatgttgctcaaatcttgacttttgaaaaaacatgttgaggggaatattagaattcacagtagatcagactcatagaacagtattcatagagttgaattcgttgagagtaattgtaacccgaatgcactcatcattgacccgcccattctttctagatacttgggtttcagagatgactccgttgcatttccctgcaatggaaaagctcacagtttagttgaggagacagacatacattcaactacctacaatccatgctgtaacagaggcataaacaaagcaatatggaagcactacaaagtgatggtaaactactttgctggggaaagagacaaggtaacatggaggaagtgatatttgattgggccttaaagaaaagtacaatttctcccaggccagagaatggagggt

SEQ ID NO: 942 - DNA, 167 bp, Artificial
  Synthetic oligonucleotide
aggctgctaggctctggggatgcagcagtgaccaaaatgagctgagacctgcctgcatggagattacagtctagagcagtgctgtccaggagacatacaatgggtgccacatttggaattctgagttttctagtagccccactaagacaaagtttaaaaagaaacag

SEQ ID NO: 943 - DNA, 939 bp, Artificial
  Synthetic oligonucleotide
gtgacaagccctggactccggtgcggctgggcctggggctacctgaagggagagcagagactcaggtgcccggtgagcaatggcagtgaggagaagcagagagcaacgccagcaagcaacgcctcctgcccctgcttttgctcttgtgtctcttgaccctgtgaggtccagcaaccatggggactgagcagcagttggacttgggggcagccgagcttctggaaaattttagcttgttattgtgaagacttgtggaatatcccaaagtgctggctttcggaaaagggtgcctacattttcttctgcacaggctctgctgaaggagtttgctgcactcttgaaaggacaggcaagctcaggtcctcatggctcgatctctgagcaggcctctaacccagtgaggacagcggtcaaccagtctccagctaacagcttcctgcagagacttccagcattgttagctaacatgcactcttctgaggccttcaacagctggaaactgtttcaggactatcttgccagctaagaagcggaatcccagttcttgttgccaggaagcttttaatggccaatggagaatgctgtcctcccttggtgaaagaattcccaaggaaatttgggaatcttttaggattcacttcaatggaatgtttcttgggacatgtgtcttcaggcactggaagccactcacggacaagaaggcacggatgaccccttgctcagcaatgtgggattagcctctttgggcagggcaatctctctgcccccagtggcttagacagctggctctgagacatagcagaaggtctcacaaatgttaggaaaagggggttgagcattattcctccatgtggaattatttttgtatttatccagaaagtgactcttttttggtctttgaaatcatctgtgatataattagaagatgtcagagcttca

SEQ ID NO: 944 - DNA, 147 bp, Artificial
  Synthetic oligonucleotide
tggctgctgggtgccctgaccagagccctgagttgcaaccctggaaccctggccatgaccaagaccaccatgtgcatatcggccagggcaagacactgctgctcacctcttctgccacggtctattccatccacatctcagagggag

SEQ ID NO: 945 - DNA, 139 bp, Artificial
  Synthetic oligonucleotide
gcaagctggtcattaaagaccacgacgagccgattgttttgcgaacccggcacatcctgattgacaacggaggagagctgcatgctgggagtgccctctgccctttccagggcaatttcaccatcattttgtatggaag

SEQ ID NO: 946 - DNA, 237 bp, Artificial
  Synthetic oligonucleotide
ggctgatgaaggtattcagccggatccttactatggtctgaagtacattggggttggtaaaggaggcgctcttgagttgcatggacagaaaaagctctcctggacatttctgaacaagacccttcacccaggtggcatggcagaaggaggctatttttttgaaaggagctggggccaccgtggagttattgttcatgtcatcgaccccaaatcaggcacagtcatccattctgaccg

SEQ ID NO: 947 - DNA, 180 bp, Artificial
  Synthetic oligonucleotide
gtttgacacctatagatccaagaaagagagtgaacgtctggtccagtatttgaacgcggtgcccgatggcaggatcctttctgttgcagtgaatgatgaaggttctcgaaatctggatgacatggccaggaaggcgatgaccaaattgggaagcaaacacttcctgcaccttggatttag

SEQ ID NO: 948 - DNA, 601 bp, Artificial
  Synthetic oligonucleotide
gtgaggagtttcagacaatttggtgacacctaacagtgggatagaagaccagaaatcactgtctttgcagaactaggatttatctcttataccagtaggaccactttaatttttgcagaatcaactaaaaatgtgcaaccaaaagttgtctttaattagacaagccactttagcccatagcccagaaggatgttctcctctggctaagatttcaatttcacctcagtcagggtctgcggcattcagcttagttcacggaatatctttgatgtggcaggcaatggcactgaacaggaaatgcagataggaatagaacctgccctccaaatagcccacatgcagggattgcagaaagcagcaatcctagttgcagtccttggataacgggtttacagatggattttctttcttttctctttaatttgcttttgcaataacaaagaatataaattgcttttataaaagtaagaaactcattaagagaaactcattttttaattaaaacatgggagcataggcagattgattagagccatccatgccccagcctggtgcaaccatggacagataatattcagttcccatggtgctgaggatgctt

SEQ ID NO: 949 - DNA, 122 bp, Artificial
  Synthetic oligonucleotide
acgtggagtggacggagtggttcgatcatgataaagtatctcagactaaaggtggggagaaaatttcagacctctggaaagctcacccaggaaaaatatgcaatcgtcccattgatatacag

SEQ ID NO: 950 - DNA, 522 bp, Artificial
  Synthetic oligonucleotide
ttagaatcacctggacaacttttcaaagtccagatgtccatgctgcaccccagacacaatcaaatctgaggctccgaggatggggactgggcatgagtattttttaaagactcctccccatgggatgcagaaccatgtttggactgttggccgctgttcatggtgctggtagtggtggtgcaaattgtaaaaagtggccagcccagatcctagaagagtggctacttattgtaaatgctccgtaaaatgttcacccagccataagcagtagatcactggtttcgatactgagtactgtaggacctcaggccaggcatttatctattccaagactttaggctgtctttctcataacaaaactgatgggggcaatcattgggataatcatctcgggccgttgtaaatagtgttgcagcagggacaattttagacttctgagtatatgtttagaacattaatcagcaccttccttctctataaaaaaaaaacgactttgctctgtaatttctgtgtcattcccag

SEQ ID NO: 951 - DNA, 133 bp, Artificial
  Synthetic oligonucleotide
gccactacaatggatggagttaacctcagcaccgaggttgtctacaaaaaaggccaggattataggtttgcttgctacgaccggggcagagcctgccggagctaccgtgtacggttcctctgtgggaagcctg

SEQ ID NO: 952 - DNA, 192 bp, Artificial
  Synthetic oligonucleotide
tgaggcccaaactcacagtcaccattgacaccaatgtgaacagcaccattctgaacttggaggataatgtacagtcatggaaacctggagataccctggtcattgccagtactgattactccatgtaccaggcagaagagttccaggtgcttccctgcagatcctgcgcccccaaccaggtcaaagtggcag

SEQ ID NO: 953 - DNA, 1360 bp, Artificial
  Synthetic oligonucleotide
ctcaaatggaagagaaagtatccataagccaggtcagcaacctcagtgaagagcccaacgaatttagagcccgcctaagatctctttattccataaaagagtgtgggattgttgtggaggcagaatttgcggctataaatcaaaggcagttctaaagtttgaactcttgtcaccctgcaccgttcttgagatgcattttctgcacagagtggggaggaagggactgcatttggcaagagattgagtggagtgatgggagggagagaatggagagaaaacagaggggttaggtgcagaccacaggttcaggggctctgattacagcaggagaaagactggcaattactaggaggggtagcagaactggaaaaggtcttttgtttgttagttttttaaggatgggaaggtctagagaagtttgaagacggaatataaggagcccaaatgaaggaagaaatgaaattactagtggagggagtccagggccttaaggatatggaaaggggtaagactgggggtcagtgcacaagtcgggagagcatcctctccaccgacaccagaggaagggtgggggatggtgaggagctcagtacagagttgggtggaggccgttcttcactgctccacgtggtaccatggaggcatccagagccaggccacagtggtggatgcagaagctccaatctggctctttctggagccccaggctgtagatacacactctacatgaggctgaggtaagcagaatagggatttgcctgctttaacagattatgaatttgcactgctgtaaagcaggggctttaaagacagaggggttctgttttatcttcctaagatcggcaatctacggtatcatccagagaccaggtttcttctctcccgttgctctgccatctctggggcatggtgctcacctgcatgggcgaggctggcctgccagcccccagaaaagagcaagaggagggcagtctggaggtggcacttatcacttctcaaaccttacagccacacctaactacagggaggctgagaaatgtcattcccttgggtggccctgtgtccagctaaaatgcaggagtctaggactgaaaaacagaagaggagacaaatattaggggacaattagccatttctgccaaaggcttcagacctaagcctgtgtaactgtgagatctgggtctgcatgcaggcgtgtgacttcacctccctgaccttcatccttctgtaacatgagaccactgtgcacaccaggcatggcgatgagtaagcagcagccatggaggcacctggcaggggcccagaactcagtgggcatgcagtacctgctgttgtttaccgtcctccctttctgccctag

SEQ ID NO: 954 - DNA, 176 bp, Artificial
  Synthetic oligonucleotide
ggaaaccaatgtacctgcacatcggggaggagatagacggcgtggacatgcgggcggaggttgggcttctgagccggaacatcatagtgatgggggagatggaggacaaatgctacccctacagaaaccacatctgcaatttctttgacttcgatacctttgggggccacatcaag

SEQ ID NO: 955 - DNA, 210 bp, Artificial
  Synthetic oligonucleotide
tttgctctgggatttaaggcagcacacttggagggcacggagctgaagcatatgggacagcagctggtgggtcagtacccgattcacttccacctggccggtgatgtagacgaaaggggaggttatgacccacccacatacatcagggacctctccatccatcatacattctctcgctgcgtcacagtccatggctccaatggcttgttg

SEQ ID NO: 956 - DNA, 206 bp, Artificial
  Synthetic oligonucleotide
atcaaggacgttgtgggctataactctttgggccactgcttcttcacggaagatgggccggaggaacgcaacacttttgaccactgtcttggcctccttgtcaagtctggaaccctcctcccctcggaccgtgacagcaagatgtgcaagatgatcacagaggactcctacccagggtacatccccaagcccaggcaagactgcaa

SEQ ID NO: 957 - DNA, 129 bp, Artificial
  Synthetic oligonucleotide
gaaactggattttggtttatttttcaccacgtaccaacgggcccctccgtgggaatgtactccccaggttattcagagcacattccactgggaaaattctataacaaccgagcacattccaactaccgg

SEQ ID NO: 958 - DNA, 132 bp, Artificial
  Synthetic oligonucleotide
atacagccctcaccaggacgccgacccgctgaagccccgggagccggccatcatcagacacttcattgcctacaagaaccaggaccacggggcctggctgcgcggcggggatgtgtggctggacagctgccg

SEQ ID NO: 959 - DNA, 156 bp, Artificial
  Synthetic oligonucleotide
tggtggaaccttcccgtatgacgacggctccaagcaagagataaagaacagcttgtttgttggcgagagtggcaacgtggggacggaaatgatggacaataggatctggggccctggcggcttggaccatagcggaaggaccctccctataggcca

SEQ ID NO: 960 - DNA, 181 bp, Artificial
  Synthetic oligonucleotide
gaattttccaattagaggaattcagttatatgatggccccatcaacatccaaaactgcactttccgaaagtttgtggccctggagggccggcacaccagcgccctggccttccgcctgaataatgcctggcagagctgcccccataacaacgtgaccggcattgcctttgaggacgttccg

SEQ ID NO: 961 - DNA, 140 bp, Artificial
  Synthetic oligonucleotide
attacttccagagtgttcttcggagagcctgggccctggttcaaccagctggacatggatggggataagacatctgtgttccatgacgtcgacggctccgtgtccgagtaccctggctcctacctcacgaagaatgacaa

SEQ ID NO: 962 - DNA, 212 bp, Artificial
  Synthetic oligonucleotide
atgtacattcaagcctacaagaccagtaacctgcgaatgaagatcatcaagaatgacttccccagccaccctctttacctggagggggcgctcaccaggagcacccattaccagcaataccaaccggttgtcaccctgcagaagggctacaccatccactgggaccagacggcccccgccgaactcgccatctggctcatcaacttcaacaa

SEQ ID NO: 963 - DNA, 186 bp, Artificial
  Synthetic oligonucleotide
gggcgactggatccgagtggggctctgctacccgcgaggcaccacattctccatcctctcggatgttcacaatcgcctgctgaagcaaacgtccaagacgggcgtcttcgtgaggaccttgcagatggacaaagtggagcagagctaccctggcaggagccactactactgggacgaggactcagg

SEQ ID NO: 964 - DNA, 215 bp, Artificial
  Synthetic oligonucleotide
gtgagcaggcgcccacttggctgcaggaaagtggctcaacctcatcttgtccccttggcctttccaataagtctaagaacagccatgtagttaatgccaattaatgtaagacacctttctaggcattttgactctaaggctgactgtcccatacattaacgacatttttaaagctattaagctttaaaagtaaaataaacaccctattaaatata

SEQ ID NO: 965 - DNA, 205 bp, Artificial
  Synthetic oligonucleotide
gctgttgttcctgaagctgaaagctcagaacgagagagagaagtttgctttctgctccatgaaaggctgtgagaggataaagattaaagctctgattccaaagaacgcaggcgtcagtgactgcacagccacagcttaccccaagttcaccgagagggctgtcgtagacgtgccgatgcccaagaagctctttggttctcagctg

SEQ ID NO: 966 - DNA, 158 bp, Artificial
  Synthetic oligonucleotide
gtggatgggaagaagtaccccagttcggaggatggcatccaggtggtggtgattgacgggaaccaagggcgcgtggtgagccacacgagcttcaggaactccattctgcaaggcataccatggcagcttttcaactatgtggcgaccatccctgacaa

SEQ ID NO: 967 - DNA, 983 bp, Artificial
  Synthetic oligonucleotide
atggcattcgttggcttcaaaggcagcttccggcccatctgggtgacactggacactgaggatcacaaagccaaaatcttccaagttgtgcccatccctgtggtgaagaagaagaagttgtgaggacagctgccgcccggtgccacctcgtggtagactatgacggtgactcttggcagcagaccagtgggggatggctgggtcccccagcccctgccagcagctgcctgggaaggccgtgtttcagccctgatgggccaagggaaggctatcagagaccctggtgctgccacctgcccctactcaagtgtctacctggagcccctggggcggtgctggccaatgctggaaacattcactttcctgcagcctcttgggtgcttctctcctatctgtgcctcttcagtgggggtttggggaccatatcaggagacctgggttgtgctgacagcaaagatccactttggcaggagccctgacccagctaggaggtagtctggagggctggtcattcacagatccccatggtcttcagcagacaagtgagggtggtaaatgtaggagaaagagccttggccttaaggaaatctttactcctgtaagcaagagccaacctcacaggattaggagctggggtagaactggctatccttggggaagaggcaagccctgcctctggccgtgtccacctttcaggagactttgagtggcaggtttggacttggactagatgactctcaaaggcccttttagttctgagattccagaaatctgctgcatttcacatggtacctggaacccaacagttcatggatatccactgatatccatgatgctgggtgccccagcgcacacgggatggagaggtgagaactaatgcctagcttgaggggtctgcagtccagtagggcaggcagtcaggtccatgtgcactgcaatgccaggtggagaaatcacagagaggtaaaatggaggccagtgcc

SEQ ID NO: 968 - DNA, 421 bp, Artificial
  Synthetic oligonucleotide
atttcagaggggaggctcaggaaggcttcttgcttacaggaatgaaggctgggggcattttgctggggggagatgaggcagcctctggaatggctcagggattcagccctccctgccgctgcctgctgaagctggtgactacggggtcgccctttgctcacgtctctctggcccactcatgatggagaagtgtggtcagaggggagcaatgggctttgctgcttatgagcacagaggaattcagtccccaggcagccctgcctctgactccaagagggtgaagtccacagaagtgagctcctgccttagggcctcatttgctcttcatccagggaactgagcacagggggcctccaggagaccctagatgtgctcgtactccctcggcctgggatttcagagctggaaatatagaaaatat

SEQ ID NO: 969 - DNA, 581 bp, Artificial
  Synthetic oligonucleotide
cctagcccttgctgccacaccacattgcctcaacaaccggccccagagtgcccaggcactcctgaggtagcttctggaaatggggacaagtcccctcgaaggaaaggaaatgactagagtagaatgacagctagcagatctcttccctcctgctcccagcgcacacaaacccgccctccccttggtgttggcggtccctgtggccttcactttgttcactacctgtcagcccagcctgggtgcacagtagctgcaactccccattggtgctacctggctctcctgtctctgcagctctacaggtgaggcccagcagagggagtagggctcgccatgtttctggtgagccaatttggctgatcttgggtgtctgaacagctattgggtccaccccagtccctttcagctgctgcttaatgccctgctctctccctggcccaccttatagagagcccaaagagctcctgtaagagggagaactctatctgtggtttataatcttgcacgaggcaccagagtctccctgggtcttgtgatgaactacatttatcccctttcctgccccaaccacaaactctttc

SEQ ID NO: 970 - DNA, 789 bp, Artificial
  Synthetic oligonucleotide
ccaccaaacatctttcagctgctgggaggtgaccatagggctctgcttttaaagatatggctgcttcaaaggccagagtcacaggaaggacttcttccagggagattagtggtgatggagaggagagttaaaatgacctcatgtccttcttgtccacggttttgttgagttttcactcttctaatgcaagggtctcacactgtgaaccacttaggatgtgatcactttcaggtggccaggaatgttgaatgtctttggctcagttcatttaaaaaagatatctatttgaaagttctcagagttgtacatatgtttcacagtacaggatctgtacataaaagtttctttcctaaaccattcaccaagagccaatatctaggcattttcttggtagcacaaattttcttattgcttagaaaattgtcctccttgttatttctgtttgtaagacttaagtgagttaggtctttaaggaaagcaacgctcctctgaaatgcttgtcttttttctgttgccgaaatagctggtcctttttcgggagttagatgtatagagtgtttgtatgtaaacatttcttgtaggcatcaccatgaacaaagatatattttctatttatttattatatgtgcacttcaagaagtcactgtcagagaaataaagaattgtcttaaatgtcatgattggagatgtcctttgcattgcttggaaggggtgtacctagagccaaggaaattggctctggtttggaaaaattttgctgttattatagtaaacatacaaaggatgtca

SEQ ID NO: 971 - DNA, 95 bp, Artificial
  Synthetic oligonucleotide
atggagaaggtcagtgaagccgcatcacttatgcagctccaggtgggggtcactcggctcaaggtggtggagttggaactcagacctatgtcacc

SEQ ID NO: 972 - DNA, 110 bp, Artificial
  Synthetic oligonucleotide
ggagcacactgccaggatgggagctgctgggaggcaggacttcctcttcaaggccatgctgaccatcagctggctcactctgacctgcttccctggggccacatccacag

SEQ ID NO: 973 - DNA, 71 bp, Artificial
  Synthetic oligonucleotide
acacccttggagttttctaactgtgaaaggaaatccatcatcttcagtggaagaccatattgaatatcatg

SEQ ID NO: 974 - DNA, 96 bp, Artificial
  Synthetic oligonucleotide
gacatcgaggctctgctgctgcccgggtattcaaattgttccagacagagcatggcgaatatttcaatgtttctttgtccagtgagtgggttcaag

SEQ ID NO: 975 - DNA, 70 bp, Artificial
  Synthetic oligonucleotide
tgctgtgtccaccttctggatggccaatcccaacaacaacctcatcaactgtgccgctgcaggatctgag

SEQ ID NO: 976 - DNA, 86 bp, Artificial
  Synthetic oligonucleotide
gctggcatgatcatagacaacggagtcaaaaccaccgaggcctctgccaaggacaagcggccgttcctctcaatcatctctgccag

SEQ ID NO: 977 - DNA, 36 bp, Artificial
  Synthetic oligonucleotide
gtttgctgacaatggcattggcctgaccctggccag

SEQ ID NO: 978 - DNA, 76 bp, Artificial
  Synthetic oligonucleotide
ctggctggtccggcacccagactgcatcaatgttcccgactggagaggggccatttgcagtgggtgctatgcacag

SEQ ID NO: 979 - DNA, 87 bp, Artificial
  Synthetic oligonucleotide
aaaacaaaggaccatttcttggaggtgaagatggagagttccaagcagcacttcttccacctctggaacgacttcgcttacattgaa

SEQ ID NO: 980 - DNA, 101 bp, Artificial
  Synthetic oligonucleotide
ttccatagtgcttatggcatcaaagggaagatacgtctccagaggcccatggaccagagtgctggaaaagcttggggcagacaggggtctcaagttgaaag

SEQ ID NO: 981 - DNA, 5 bp, Artificial
  Synthetic oligonucleotide
agcaa

SEQ ID NO: 982 - DNA, 93 bp, Artificial
  Synthetic oligonucleotide
ctagcccaaagccttcattttaacagatggggaaagtgagcccccaagatgggaaagaaccacacagctaagggagggcctggggagccccac

SEQ ID NO: 983 - DNA, 9 bp, Artificial
  Synthetic oligonucleotide
cttcaaaga

SEQ ID NO: 984 - DNA, 69 bp, Artificial
  Synthetic oligonucleotide
gggcctgcctggctccctccacccaactgcacccatgagactcggtccaagagtccattccccaggtgg

SEQ ID NO: 985 - DNA, 25 bp, Artificial
  Synthetic oligonucleotide
gagccaactgtcagggaggtctttc

SEQ ID NO: 986 - protein, 1361 aa, Homo sapiens
MGAAGRQDFLFKAMLTISWLTLTCFPGATSTVAAGCPDQSPELQPWNPGHDQDHHVHIGQGKTLLLTSSATVYSIHISEGGKLVIKDHDEPIVLRTRHILIDNGGELHAGSALCPFQGNFTIILYGRADEGIQPDPYYGLKYIGVGKGGALELHGQKKLSWTFLNKTLHPGGMAEGGYFFERSWGHRGVIVHVIDPKSGTVIHSDRFDTYRSKKESERLVQYLNAVPDGRILSVAVNDEGSRNLDDMARKAMTKLGSKHFLHLGFRHPWSFLTVKGNPSSSVEDHIEYHGHRGSAAARVFKLFQTEHGEYFNVSLSSEWVQDVEWTEWFDHDKVSQTKGGEKISDLWKAHPGKICNRPIDIQATTMDGVNLSTEVVYKKGQDYRFACYDRGRACRSYRVRFLCGKPVRPKLTVTIDTNVNSTILNLEDNVQSWKPGDTLVIASTDYSMYQAEEFQVLPCRSCAPNQVKVAGKPMYLHIGEEIDGVDMRAEVGLLSRNIIVMGEMEDKCYPYRNHICNFFDFDTFGGHIKFALGFKAAHLEGTELKHMGQQLVGQYPIHFHLAGDVDERGGYDPPTYIRDLSIHHTFSRCVTVHGSNGLLIKDVVGYNSLGHCFFTEDGPEERNTFDHCLGLLVKSGTLLPSDRDSKMCKMITEDSYPGYIPKPRQDCNAVSTFWMANPNNNLINCAAAGSEETGFWFIFHHVPTGPSVGMYSPGYSEHIPLGKFYNNRAHSNYRAGMIIDNGVKTTEASAKDKRPFLSIISARYSPHQDADPLKPREPAIIRHFIAYKNQDHGAWLRGGDVWLDSCRFADNGIGLTLASGGTFPYDDGSKQEIKNSLFVGESGNVGTEMMDNRIWGPGGLDHSGRTLPIGQNFPIRGIQLYDGPINIQNCTFRKFVALEGRHTSALAFRLNNAWQSCPHNNVTGIAFEDVPITSRVFFGEPGPWFNQLDMDGDKTSVFHDVDGSVSEYPGSYLTKNDNWLVRHPDCINVPDWRGAICSGCYAQMYIQAYKTSNLRMKIIKNDFPSHPLYLEGALTRSTHYQQYQPVVTLQKGYTIHWDQTAPAELAIWLINFNKGDWIRVGLCYPRGTTFSILSDVHNRLLKQTSKTGVFVRTLQMDKVEQSYPGRSHYYWDEDSGLLFLKLKAQNEREKFAFCSMKGCERIKIKALIPKNAGVSDCTATAYPKFTERAVVDVPMPKKLFGSQLKTKDHFLEVKMESSKQHFFHLWNDFAYIEVDGKKYPSSEDGIQVVVIDGNQGRVVSHTSFRNSILQGIPWQLFNYVATIPDNSIVLMASKGRYVSRGPWTRVLEKLGADRGLKLKEQMAFVGFKGSFRPIWVTLDTEDHKAKIFQVVPIPVVKKKKL

SEQ ID NO: 987 - protein, 992 aa, Homo sapiens
MGAAGRQDFLFKAMLTISWLTLTCFPGATSTVAAGCPDQSPELQPWNPGHDQDHHVHIGQGKTLLLTSSATVYSIHISEGGKLVIKDHDEPIVLRTRHILIDNGGELHAGSALCPFQGNFTIILYGRADEGIQPDPYYGLKYIGVGKGGALELHGQKKLSWTFLNKTLHPGGMAEGGYFFERSWGHRGVIVHVIDPKSGTVIHSDRFDTYRSKKESERLVQYLNAVPDGRILSVAVNDEGSRNLDDMARKAMTKLGSKHFLHLGFRHPWSFLTVKGNPSSSVEDHIEYHGHRGSAAARVFKLFQTEHGEYFNVSLSSEWVQDVEWTEWFDHDKVSQTKGGEKISDLWKAHPGKICNRPIDIQATTMDGVNLSTEVVYKKGQDYRFACYDRGRACRSYRVRFLCGKPVRPKLTVTIDTNVNSTILNLEDNVQSWKPGDTLVIASTDYSMYQAEEFQVLPCRSCAPNQVKVAGKPMYLHIGEEIDGVDMRAEVGLLSRNIIVMGEMEDKCYPYRNHICNFFDFDTFGGHIKFALGFKAAHLEGTELKHMGQQLVGQYPIHFHLAGDVDERGGYDPPTYIRDLSIHHTFSRCVTVHGSNGLLIKDVVGYNSLGHCFFTEDGPEERNTFDHCLGLLVKSGTLLPSDRDSKMCKMITEDSYPGYIPKPRQDCNAVSTFWMANPNNNLINCAAAGSEETGFWFIFHHVPTGPSVGMYSPGYSEHIPLGKFYNNRAHSNYRAGMIIDNGVKTTEASAKDKRPFLSIISARYSPHQDADPLKPREPAIIRHFIAYKNQDHGAWLRGGDVWLDSCRFADNGIGLTLASGGTFPYDDGSKQEIKNSLFVGESGNVGTEMMDNRIWGPGGLDHSGRTLPIGQNFPIRGIQLYDGPINIQNCTFRKFVALEGRHTSALAFRLNNAWQSCPHNNVTGIAFEDVPITSRVFFGEPGPWFNQLDMDGDKTSVFHDVDGSVSEYPGSYLTKNDKWHSLASKAASGPSG

SEQ ID NO: 988 - protein, 804 aa, Homo sapiens
TRPPTRPVDERGGYDPPTYIRDLSIHHTFSRCVTVHGSNGLLIKDVVGYNSLGHCFFTEDGPEERNTFDHCLGLLVKSGTLLPSDRDSKMCKMITEDSYPGYIPKPRQDCNAVSTFWMANPNNNLINCAAAGSEETGFWFIFHHVPTGPSVGMYSPGYSEHIPLGKFYNNRAHSNYRAGMIIDNGVKTTEASAKDKRPFLSIISARYSPHQDADPLKPREPAIIRHFIAYKNQDHGAWLRGGDVWLDSCRFADNGIGLTLASGGTFPYDDGSKQEIKNSLFVGESGNVGTEMMDNRIWGPGGLDHSGRTLPIGQNFPIRGIQLYDGPINIQNCTFRKFVALEGRHTSALAFRLNNAWQSCPHNNVTGIAFEDVPITSRVFFGEPGPWFNQLDMDGDKTSVFHDVDGSVSEYPGSYLTKNDNWLVRHPDCINVPDWRGAICSGCYAQMYIQAYKTSNLRMKIIKNDFPSHPLYLEGALTRSTHYQQYQPVVTLQKGYTIHWDQTAPAELAIWLINFNKGDWIRVGLCYPRGTTFSILSDVHNRLLKQTSKTGVFVRTLQMDKVEQSYPGRSHYYWDEDSGLLFLKLKAQNEREKFAFCSMKGCERIKIKALIPKNAGVSDCTATAYPKFTERAVVDVPMPKKLFGSQLKTKDHFLEVKMESSKQHFFHLWNDFAYIEVDGKKYPSSEDGIQVVVIDGNQGRVVSHTSFRNSILQGIPWQLFNYVATIPDNSIVLMASKGRYVSRGPWTRVLEKLGADRGLKLKEQMAFVGFKGSFRPIWVTLDTEDHKAKIFQVVPIPVVKKKKL

SEQ ID NO: 989 - protein, 1013 aa, Homo sapiens
AHPGKICNRPIDIQATTMDGVNLSTEVVYKKGQDYRFACYDRGRACRSYRVRFLCGKPVRPKLTVTIDTNVNSTILNLEDNVQSWKPGDTLVIASTDYSMYQAEEFQVLPCRSCAPNQVKVAGKPMYLHIGEEIDGVDMRAEVGLLSRNIIVMGEMEDKCYPYRNHICNFFDFDTFGGHIKFALGFKAAHLEGTELKHMGQQLVGQYPIHFHLAGDVDERGGYDPPTYIRDLSIHHTFSRCVTVHGSNGLLIKDVVGYNSLGHCFFTEDGPEERNTFDHCLGLLVKSGTLLPSDRDSKMCKMITEDSYPGYIPKPRQDCNAVSTFWMANPNNNLINCAAAGSEETGFWFIFHHVPTGPSVGMYSPGYSEHIPLGKFYNNRAHSNYRAGMIIDNGVKTTEASAKDKRPFLSIISARYSPHQDADPLKPREPAIIRHFIAYKNQDHGAWLRGGDVWLDSCRFADNGIGLTLASGGTFPYDDGSKQEIKNSLFVGESGNVGTEMMDNRIWGPGGLDHSGRTLPIGQNFPIRGIQLYDGPINIQNCTFRKFVALEGRHTSALAFRLNNAWQSCPHNNVTGIAFEDVPITSRVFFGEPGPWFNQLDMDGDKTSVFHDVDGSVSEYPGSYLTKNDNWLVRHPDCINVPDWRGAICSGCYAQMYIQAYKTSNLRMKIIKNDFPSHPLYLEGALTRSTHYQQYQPVVTLQKGYTIHWDQTAPAELAIWLINFNKGDWIRVGLCYPRGTTFSILSDVHNRLLKQTSKTGVFVRTLQMDKVEQSYPGRSHYYWDEDSGLLFLKLKAQNEREKFAFCSMKGCERIKIKALIPKNAGVSDCTATAYPKFTERAVVDVPMPKKLFGSQLKTKDHFLEVKMESSKQHFFHLWNDFAYIEVDGKKYPSSEDGIQVVVIDGNQGRVVSHTSFRNSILQGIPWQLFNYVATIPDNSIVLMASKGRYVSRGPWTRVLEKLGADRGLKLKEQMAFVGFKGSFRPIWVTLDTEDHKAKIFQVVPIPVVKKKKL

SEQ ID NO: 990 - protein, 500 aa, Homo sapiens
TSGRTLPIGQNFPIRGIQLYDGPINIQNCTFRKFVALEGRHTSALAFRLNNAWQSCPHNNVTGIAFEDVPITSRVFFGEPGPWFNQLDMDGDKTSVFHDVDGSVSEYPGSYLTKNDNWLVRHPDCINVPDWRGAICSGCYAQMYIQAYKTSNLRMKIIKNDFPSHPLYLEGALTRSTHYQQYQPVVTLQKGYTIHWDQTAPAELAIWLINFNKGDWIRVGLCYPRGTTFSILSDVHNRLLKQTSKTGVFVRTLQMDKVEQSYPGRSHYYWDEDSGLLFLKLKAQNEREKFAFCSMKGCERIKIKALIPKNAGVSDCTATAYPKFTERAVVDVPMPKKLFGSQLKTKDHFLEVKMESSKQHFFHLWNDFAYIEVDGKKYPSSEDGIQVVVIDGNQGRVVSHTSFRNSILQGIPWQLFNYVATIPDNSIVLMASKGRYVSRGPWTRVLEKLGADRGLKLKEQMAFVGFKGSFRPIWVTLDTEDHKAKIFQVVPIPVVKKKKL

SEQ ID NO: 991 - protein, 888 aa, Homo sapiens
MYLHIGEEIDGVDMRAEVGLLSRNIIVMGEMEDKCYPYRNHICNFFDFDTFGGHIKFALGFKAAHLEGTELKHMGQQLVGQYPIHFHLAGDVDERGGYDPPTYIRDLSIHHTFSRCVTVHGSNGLLIKDVVGYNSLGHCFFTEDGPEERNTFDHCLGLLVKSGTLLPSDRDSKMCKMITEDSYPGYIPKPRQDCNAVSTFWMANPNNNLINCAAAGSEETGFWFIFHHVPTGPSVGMYSPGYSEHIPLGKFYNNRAHSNYRAGMIIDNGVKTTEASAKDKRPFLSIISARYSPHQDADPLKPREPAIIRHFIAYKNQDHGAWLRGGDVWLDSCRFADNGIGLTLASGGTFPYDDGSKQEIKNSLFVGESGNVGTEMMDNRIWGPGGLDHSGRTLPIGQNFPIRGIQLYDGPINIQNCTFRKFVALEGRHTSALAFRLNNAWQSCPHNNVTGIAFEDVPITSRVFFGEPGPWFNQLDMDGDKTSVFHDVDGSVSEYPGSYLTKNDNWLVRHPDCINVPDWRGAICSGCYAQMYIQAYKTSNLRMKIIKNDFPSHPLYLEGALTRSTHYQQYQPVVTLQKGYTIHWDQTAPAELAIWLINFNKGDWIRVGLCYPRGTTFSILSDVHNRLLKQTSKTGVFVRTLQMDKVEQSYPGRSHYYWDEDSGLLFLKLKAQNEREKFAFCSMKGCERIKIKALIPKNAGVSDCTATAYPKFTERAVVDVPMPKKLFGSQLKTKDHFLEVKMESSKQHFFHLWNDFAYIEVDGKKYPSSEDGIQVVVIDGNQGRVVSHTSFRNSILQGIPWQLFNYVATIPDNSIVLMASKGRYVSRGPWTRVLEKLGADRGLKLKEQMAFVGFKGSFRPIWVTLDTEDHKAKIFQVVPIPVVKKKKL

SEQ ID NO: 992 - protein, 996 aa, Homo sapiens [sequence omitted]

SEQ ID NO: 993 - protein, 1144 aa, Homo sapiens
MGAAGRQDFLFKAMLTISWLTLTCFPGATSTVAAGCPDQSPELQPWNPGHDQDHHVHIGQGKTLLLTSSATVYSIHISEGGKLVIKDHDEPIVLRTRHILIDNGGELHAGSALCPFQGNFTIILYGRADEGIQPDPYYGLKYIGVGKGGALELHGQKKLSWTFLNKTLHPGGMAEGGYFFERSWGHRGVIVHVIDPKSGTVIHSDRFDTYRSKKESERLVQYLNAVPDGRILSVAVNDEGSRNLDDMARKAMTKLGSKHFLHLGFRHPWSFLTVKGNPSSSVEDHIEYHGHRGSAAARVFKLFQTEHGEYFNVSLSSEWVQDVEWTEWFDHDKVSQTKGGEKISDLWKAHPGKICNRPIDIQATTMDGVNLSTEVVYKKGQDYRFACYDRGRACRSYRVRFLCGKPVRPKLTVTIDTNVNSTILNLEDNVQSWKPGDTLVIASTDYSMYQAEEFQVLPCRSCAPNQVKVAGKPMYLHIGEEIDGVDMRAEVGLLSRNIIVMGEMEDKCYPYRNHICNFFDFDTFGGHIKFALGFKAAHLEGTELKHMGQQLVGQYPIHFHLAGDVDERGGYDPPTYIRDLSIHHTFSRCVTVHGSNGLLIKDVVGYNSLGHCFFTEDGPEERNTFDHCLGLLVKSGTLLPSDRDSKMCKMITEDSYPGYIPKPRQDCNAVSTFWMANPNNNLINCAAAGSEETGFWFIFHHVPTGPSVGMYSPGYSEHIPLGKFYNNRAHSNYRAGMIIDNGVKTTEASAKDKRPFLSIISARYSPHQDADPLKPREPAIIRHFIAYKNQDHGAWLRGGDVWLDSCRFADNGIGLTLASGGTFPYDDGSKQEIKNSLFVGESGNVGTEMMDNRIWGPGGLDHSGRTLPIGQNFPIRGIQLYDGPINIQNCTFRKFVALEGRHTSALAFRLNNAWQSCPHNNVTGIAFEDVPITSRVFFGEPGPWFNQLDMDGDKTSVFHDVDGSVSEYPGSYLTKNDNWLVRHPDCINVPDWRGAICSGCYAQMYIQAYKTSNLRMKIIKNDFPSHPLYLEGALTRSTHYQQYQPVVTLQKGYTIHWDQTAPAELAIWLINFNKGDWIRVGLCYPRGTTFSILSDVHNRLLKQTSKTGVFVRTLQMDKVEQSYPGRSHYYWDEDSGKQRTISWR

SEQ ID NO: 994 - protein, 59 aa, Homo sapiens [sequence omitted]

SEQ ID NO: 995 - protein, 57 aa, Homo sapiens
MTLNSWLSSVDSHADSSFQHTHGFLMEKVSEAASLMQLQVGVTRLKVVELELRPMSP

SEQ ID NO: 996 - protein, 1136 aa, Homo sapiens
MGAAGRQDFLFKAMLTISWLTLTCFPGATSTVAAGCPDQSPELQPWNPGHDQDHHVHIGQGKTLLLTSSATVYSIHISEGGKLVIKDHDEPIVLRTRHILIDNGGELHAGSALCPFQGNFTIILYGRADEGIQPDPYYGLKYIGVGKGGALELHGQKKLSWTFLNKTLHPGGMAEGGYFFERSWGHRGVIVHVIDPKSGTVIHSDRFDTYRSKKESERLVQYLNAVPDGRILSVAVNDEGSRNLDDMARKAMTKLGSKHFLHLGFRHPWSFLTVKGNPSSSVEDHIEYHGHRGSAAARVFKLFQTEHGEYFNVSLSSEWVQDVEWTEWFDHDKVSQTKGGEKISDLWKAHPGKICNRPIDIQATTMDGVNLSTEVVYKKGQDYRFACYDRGRACRSYRVRFLCGKPVRPKLTVTIDTNVNSTILNLEDNVQSWKPGDTLVIASTDYSMYQAEEFQVLPCRSCAPNQVKVAGKPMYLHIGEEIDGVDMRAEVGLLSRNIIVMGEMEDKCYPYRNHICNFFDFDTFGGHIKFALGFKAAHLEGTELKHMGQQLVGQYPIHFHLAGDVDERGGYDPPTYIRDLSIHHTFSRCVTVHGSNGLLIKDVVGYNSLGHCFFTEDGPEERNTFDHCLGLLVKSGTLLPSDRDSKMCKMITEDSYPGYIPKPRQDCNAVSTFWMANPNNNLINCAAAGSEETGFWFIFHHVPTGPSVGMYSPGYSEHIPLGKFYNNRAHSNYRAGMIIDNGVKTTEASAKDKRPFLSIISARYSPHQDADPLKPREPAIIRHFIAYKNQDHGAWLRGGDVWLDSCRFADNGIGLTLASGGTFPYDDGSKQEIKNSLFVGESGNVGTEMMDNRIWGPGGLDHSGRTLPIGQNFPIRGIQLYDGPINIQNCTFRKFVALEGRHTSALAFRLNNAWQSCPHNNVTGIAFEDVPITSRVFFGEPGPWFNQLDMDGDKTSVFHDVDGSVSEYPGSYLTKNDNWLVRHPDCINVPDWRGAICSGCYAQMYIQAYKTSNLRMKIIKNDFPSHPLYLEGALTRSTHYQQYQPVVTLQKGYTIHWDQTAPAELAIWLINFNKGDWIRVGLCYPRGTTFSILSDVHNRLLKQTSKTGVFVRTLQMDKVEQSYPGRSHYYWDEDSG

SEQ ID NO: 997 - protein, 329 aa, Homo sapiens [sequence omitted]

SEQ ID NO: 998 - DNA, 2789 bp, Homo sapiens
ctccctctgcggcgggggcggccccagcggatgaatgaagcggcgcgtggctgccggggaggccagagcgtggagcgctgcgcggcgcggcggccgggccctcgagacggggacggacacaccagcccctcggataccacttggccactcccgctgaggccactcccactgcgtggctgaagcctcgaggtcaccaggcggaggcgcggagatgcccctgcatcagctgggggacaagccgctcaccttccccagccccaactcagccatggaaaacgggcttgaccacaccccacccagcaggagggcatccccgggcacacccctgagccccggctccctccgctccgctgcccatagccccctggacaccagcaagcagcccctctgccagctctgggccgagaagcatggcgcccgggggacccatgaggtgcggtacgtctcggccgggcagagcgtggcgtgcggctggtgggccttcgcaccgccgtgcctgcaggtcctcaacacgcccaagggcatcctgttcttcctgtgtgcggccgcattcctgcaggggatgactgtgaatggcttcatcaacacagtcatcacctccctggagcgccgctatgacctgcacagctaccagagcgggctcatcgccagctcctacgacattgccgcctgcctctgcctcaccttcgtcagctacttcgggggctcagggcacaagccgcgctggctgggctggggcgtgctgcttatgggcacggggtcgctggtgttcgcgctgccccacttcacggctggccgctatgaggtggagttggacgcgggtgtcaggacgtgccctgccaaccccggcgcggtgtgtgcggacagcacctcgggcctgtcccgctaccagctggtcttcatgctgggccagttcctgcatggcgtgggtgccacacccctctacacgctgggcgtcacctacctggatgagaacgtcaagtccagctgctcgcccgtctacattgccatcttctacacagcggccatcctgggcccagctgccggctacctgattggaggtgccctgctgaatatctacacggaaatgggccgacggacggagctgaccaccgagagcccactgtgggtcggcgcctggtgggtcggcttcctgggctctggggccgctgctttcttcaccgccgttcccatccttggttaccctcggcagctgccaggctcccagcgctacgcggtcatgagagcggcggaaatgcaccagttgaaggacagcagccgtggggaggcgagcaacccggactttgggaaaaccatcagagacctgcctctctccatctggctcctgctgaagaaccccacgttcatcctgctctgcctggccggggccaccgaggccactctcatcaccggcatgtccacgttcagccccaagttcttggagtcccagttcagcctgagtgcctcagaagctgccaccttgtttgggtacctggtggtgccagcgggtggtggcggcaccttcctgggcggcttctttgtgaacaagctcaggctccggggctccgcggtcatcaagttctgcctgttctgcaccgttgtcagcctgctgggcatcctcgtcttctcactgcactgccccagtgtgcccatggcgggcgtcacagccagctacggcgggagcctcctgcccgaaggccacctgaacctaacggctccctgcaacgctgcctgcagctgccagccagaacactacagccctgtgtgcggctcggacggcctcatgtacttctcactgtgccacgcagggtgccctgcagccacggagacgaatgtggacggccagaaggtgtaccgagactgtagctgtatccctcagaatctttcctctggttttggccatgccactgcagggaaatgcacttcaacttgtcagagaaagcccctccttctggttttcatattcgttgtaattttctttacattcctcagcagcattcctgcactaacggcaactctacgatgtgtccgtgaccctcagagatcctttgccctgggaatccagtggattgtagttagaatactagggggcatcccggggcccatcgccttcggctgggtgatcgacaaggcctgtctgctgtggcaggaccagtgtggccagcagggctcctgcttggtgtaccagaattcggccatgagccgctacatactcatcatggggctcctgtacaaggtgctgggcgtcctcttctttgccatagcctgcttcttatacaagcccctgtcggagtcttcagatggcctggaaacttgtctgcccagccagtcctcagcccctgacagtgccacagatagccagctccagagcagcgtctgaccaccgcccgcgcccacccggccacggcgggcactcagcatttcctgatgacagaacagtgccgttgggtgatgcaatcacacgggaacttctatttgacctgcaaccttctacttaacctgtggtttaaagtcggctgtgacctcctgtccccagagctgtacggccctgcagtgggtgggaggaacttgcataaatatatatttatggacacacagtttgcatcagaacgtgtttatagaatgtgttttatacccgatcgtgtgtggtgtgcgtgaggacaaactccgcaggggctgtgaatcccactgggagggcggcgggcctgcagcccgaggaaggcttgtgtgtcctcagttaaaactgtgcatatcgaaatatattttgttatttaagcctgcgtccccgt

SEQ ID NO: 999 - DNA, 3109 bp, Homo sapiens
ctccctctgcggcgggggcggccccagcggatgaatgaagcggcgcgtggctgccggggaggccagagcgtggagcgctgcgcggcgcggcggccgggccctcgagacggggacggacacaccagcccctcggataccacttggccactcccgctgaggccactcccactgcgtggctgaagcctcgaggtcaccaggcggaggcgcggagatgcccctgcatcagctgggggacaagccgctcaccttccccagccccaactcagccatggaaaacgggcttgaccacaccccacccagcaggagggcatccccgggcacacccctgagccccggctccctccgctccgctgcccatagccccctggacaccagcaagcagcccctctgccagctctgggccgagaagcatggcgcccgggggacccatgaggtgcggtacgtctcggccgggcagagcgtggcgtgcggctggtgggccttcgcaccgccgtgcctgcaggtcctcaacacgcccaagggcatcctgttcttcctgtgtgcggccgcattcctgcaggggatgactgtgaatggcttcatcaacacagtcatcacctccctggagcgccgctatgacctgcacagctaccagagcgggctcatcgccagctcctacgacattgccgcctgcctctgcctcaccttcgtcagctacttcgggggctcagggcacaagccgcgctggctgggctggggcgtgctgcttatgggcacggggtcgctggtgttcgcgctgccccacttcacggctggccgctatgaggtggagttggacgcgggtgtcaggacgtgccctgccaaccccggcgcggtgtgtgcggacagcacctcgggcctgtcccgctaccagctggtcttcatgctgggccagttcctgcatggcgtgggtgccacacccctctacacgctgggcgtcacctacctggatgagaacgtcaagtccagctgctcgcccgtctacattgccatcttctacacagcggccatcctgggcccagctgccggctacctgattggaggtgccctgctgaatatctacacggaaatgggccgacggacggagctgaccaccgagagcccactgtgggtcggcgcctggtgggtcggcttcctgggctctggggccgctgctttcttcaccgccgttcccatccttggttaccctcggcagctgccaggctcccagcgctacgcggtcatgagagcggcggaaatgcaccagttgaaggacagcagccgtggggaggcgagcaacccggactttgggaaaaccatcagagacctgcctctctccatctggctcctgctgaagaaccccacgttcatcctgctctgcctggccggggccaccgaggccactctcatcaccggcatgtccacgttcagccccaagttcttggagtcccagttcagcctgagtgcctcagaagctgccaccttgtttgggtacctggtggtgccagcgggtggtggcggcaccttcctgggcggcttctttgtgaacaagctcaggctccggggctccgcggtcatcaagttctgcctgttctgcaccgttgtcagcctgctgggcatcctcgtcttctcactgcactgccccagtgtgcccatggcgggcgtcacagccagctacggcgggagcctcctgcccgaaggccacctgaacctaacggctccctgcaacgctgcctgcagctgccagccagaacactacagccctgtgtgcggctcggacggcctcatgtacttctcactgtgccacgcagggtgccctgcagccacggagacgaatgtggacggccagaaggtgtaccgagactgtagctgtatccctcagaatctttcctctggttttggccatgccactgcagggaaatgcacttcaacttgtcagagaaagcccctccttctggttttcatattcgttgtaattttctttacattcctcagcagcattcctgcactaacggcaactctacgatgtgtccgtgaccctcagagatcctttgccctgggaatccagtggattgtagttagaatactagggggcatcccggggcccatcgccttcggctgggtgatcgacaaggcctgtctgctgtggcaggaccagtgtggccagcagggctcctgcttggtgtaccagaattcggccatgagccgctacatactcatcatggggctcctgtacaaggtgctgggcgtcctcttctttgccatagcctgcttcttatacaagcccctgtcggagtcttcagatggcctggaaacttgtctgcccagccagtcctcagcccctgacagtgccacagatagccagctccagagcagcgtctgaccaccgcccgcgcccacccggccacggcgggcactcagcatttcctgatgacagaacagtgccgttgggtgatgcaatcacacgggaacttctatttgacctgcaaccttctacttaacctgtggtttaaagtcggctgtgacctcctgtccccagagctgtacggccctgcagtgggtgggaggaacttgcataaatatatatttatggacacacagtttgcatcagaacgtgtttatagaatgtgttttatacccgatcgtgtgtggtgtgcgtgaggacaaactccgcaggggctgtgaatcccactgggagggcggcgggcctgcagcccgaggaaggcttgtgtgtcctcagttaaaactgtgcatatcgaaatatattttgttatttaagcctgcgtccccgtaccgcgtgctttatttctatgagtttgcagagtttggtggtctcgccatccttggcccacgtcctgtagtcagccctgtggaatccgcggatatgaaaagttggccttccttatccacaggctcccccgtaagtcggccttccttatccacaggctcccctgctgaggattcatcccaccttggatggaaaatgcagtttttgtgggagatggaactggagggtacggagggctgactgcacatacaaatatacatacatgagtgtacatatgttcttatataaacgtgtcacagtaaaattgttcctcatcttgcgtta

SEQ ID NO: 1000 - DNA, 4586 bp, Homo sapiens
ctccctctgcggcgggggcggccccagcggatgaatgaagcggcgcgtggctgccggggaggccagagcgtggagcgctgcgcggcgcggcggccgggccctcgagacggggacggacacaccagcccctcggataccacttggccactcccgctgaggccactcccactgcgtggctgaagcctcgaggtcaccaggcggaggcgcggagatgcccctgcatcagctgggggacaagccgctcaccttccccagccccaactcagccatggaaaacgggcttgaccacaccccacccagcaggagggcatccccgggcacacccctgagccccggctccctccgctccgctgcccatagccccctggacaccagcaagcagcccctctgccagctctgggccgagaagcatggcgcccgggggacccatgaggtgcggtacgtctcggccgggcagagcgtggcgtgcggctggtgggccttcgcaccgccgtgcctgcaggtcctcaacacgcccaagggcatcctgttcttcctgtgtgcggccgcattcctgcaggggatgactgtgaatggcttcatcaacacagtcatcacctccctggagcgccgctatgacctgcacagctaccagagcgggctcatcgccagctcctacgacattgccgcctgcctctgcctcaccttcgtcagctacttcgggggctcagggcacaagccgcgctggctgggctggggcgtgctgcttatgggcacggggtcgctggtgttcgcgctgccccacttcacggctggccgctatgaggtggagttggacgcgggtgtcaggacgtgccctgccaaccccggcgcggtgtgtgcggacagcacctcgggcctgtcccgctaccagctggtcttcatgctgggccagttcctgcatggcgtgggtgccacacccctctacacgctgggcgtcacctacctggatgagaacgtcaagtccagctgctcgcccgtctacattgccatcttctacacagcggccatcctgggcccagctgccggctacctgattggaggtgccctgctgaatatctacacggaaatgggccgacggacggagctgaccaccgagagcccactgtgggtcggcgcctggtgggtcggcttcctgggctctggggccgctgctttcttcaccgccgttcccatccttggttaccctcggcagctgccaggctcccagcgctacgcggtcatgagagcggcggaaatgcaccagttgaaggacagcagccgtggggaggcgagcaacccggactttgggaaaaccatcagagacctgcctctctccatctggctcctgctgaagaaccccacgttcatcctgctctgcctggccggggccaccgaggccactctcatcaccggcatgtccacgttcagccccaagttcttggagtcccagttcagcctgagtgcctcagaagctgccaccttgtttgggtacctggtggtgccagcgggtggtggcggcaccttcctgggcggcttctttgtgaacaagctcaggctccggggctccgcggtcatcaagttctgcctgttctgcaccgttgtcagcctgctgggcatcctcgtcttctcactgcactgccccagtgtgcccatggcgggcgtcacagccagctacggcgggagcctcctgcccgaaggccacctgaacctaacggctccctgcaacgctgcctgcagctgccagccagaacactacagccctgtgtgcggctcggacggcctcatgtacttctcactgtgccacgcagggtgccctgcagccacggagacgaatgtggacggccagaaggtgtaccgagactgtagctgtatccctcagaatctttcctctggttttggccatgccactgcagggaaatgcacttcaacttgtcagagaaagcccctccttctggttttcatattcgttgtaattttctttacattcctcagcagcattcctgcactaacggcaactctacgatgtgtccgtgaccctcagagatcctttgccctgggaatccagtggattgtagttagaatactagggggcatcccggggcccatcgccttcggctgggtgatcgacaaggcctgtctgctgtggcaggaccagtgtggccagcagggctcctgcttggtgtaccagaattcggccatgagccgctacatactcatcatggggctcctgtacaagtttcagttaccagaggtccaccacagtctgaatgtattaaataggaaattccagaagcaaacagttcataacctttaaagcacgcgccgttctgcacagtctggtgagatcttgatctgtcctgcccaggactcggattctccctttgtccaactttggaagaaggcaaggtcagaacttattctgcagggagctttggggatattggatactaaggcccaagccctctgtgatacgcctttcgctttggcataaaataacggttgactctctgttaggcgcgtctctgctcagggagtggtggtgtttggggaagcccaaaggcacatgagcatcaggaaattgaccatttgacttcataagacataacctttgtccagcgtgtccaggctattcatgccaccacctgttgatcacttagcagccggtgtggttcccacatcccccatcaccatatcacagtgccatgttcaagccactcttatttacctaatcatggccccaaagcaccggagcactcacgccgccgttcagctctgccaatgggaagccggaggcgcctccttcagcgagaaggtgtagttccttggctgggcttagtactacccttagactcacgcgtccacaggggtctcagtgtctgcggatgagggggctgctgtactttcccagggagccgtccccagactctctctttgctgtgttggatgcatcccttagctgggagcagcaggctgagagccctccacacgcagccatcccctgggctcagcacagccagcgggagccgtatccagagggtcagagttggcctcagcagcgcatgcgtccatgttaattgtagcgggggagcacacggtgtctccttataaacaccctcgcattccactttgtcctgcaccgagtcaaaacagcctcactccctgaatgcaggctcagggccatcagccaggctgacactccaggaggcacagtgggtgtttctggtccacgcccagcgtggaaatcatagtggtgcacatgtactctgcgtgggcattgcggcagcatccgtgcttggacctcaccgcctttggggcccacgtgggattcctgccacatcgtcctcttgccctgcaaagtcggtgcagcccctcattgttgacaaagaaaccaagaccctgaaggttcagaactgcccatgatggtggcaccggggcttgaaccccggctgtggtggtgaccggcgactggctctgtgtgaggttcctgtggccgccacgacaaaggaccgcaagcggggtggcctgatgtagcagaaccagattcgcttgcaggtgggggcagggcgggctccttccgccgctctggctctctgcagctgcatgtggcctttccctctgtccctgcctcaagtcttcctctcctttctctcatgaggacaccagtcattggatttggggcccaccttagatccaggatggtctcatctcaaatccttaattacatctgcaaagaccctatttccaaaaaaggtcccattcactggtgtctggcactgttcaacccatgacaagcccctcagtcctgtgcctctgtttttagtcaaagggtgtgtttcattccctctaacaatattggcgtctgctctacaaaccggttatatgggaaagataccctctcagagcaggatgggtttccgtggacctggtgagggtgctgcaggctggggcagggacaggactgggacaggcccaccagtatccaaaggctctggccgagctccccacgaggtccagcgggctcctctctccccaggtgctgggcgtcctcttctttgccatagcctgcttcttatacaagcccctgtcggagtcttcagatggcctggaaacttgtctgcccagccagtcctcagcccctgacagtgccacagatagccagctccagagcagcgtctgaccaccgcccgcgcccacccggccacggcgggcactcagcatttcctgatgacagaacagtgccgttgggtgatgcaatcacacgggaacttctatttgacctgcaaccttctacttaacctgtggtttaaagtcggctgtgacctcctgtccccagagctgtacggccctgcagtgggtgggaggaacttgcataaatatatatttatggacacacagtttgcatcagaacgtgtttatagaatgtgttttatacccgatcgtgtgtggtgtgcgtgaggacaaactccgcaggggctgtgaatcccactgggagggcggcgggcctgcagcccgaggaaggcttgtgtgtcctcagttaaaactgtgcatatcgaaatatattttgttatttaagcctgcgtccccgt

SEQ ID NO: 1001 - DNA, 4884 bp, Homo sapiens
ctccctctgcggcgggggcggccccagcggatgaatgaagcggcgcgtggctgccggggaggccagagcgtggagcgctgcgcggcgcggcggccgggccctcgagacggggacggacacaccagcccctcggataccacttggccactcccgctgaggccactcccactgcgtggctgaagcctcgaggtcaccaggcggaggcgcggagatgcccctgcatcagctgggggacaagccgctcaccttccccagccccaactcagccatggaaaacgggcttgaccacaccccacccagcaggagggcatccccgggcacacccctgagccccggctccctccgctccgctgcccatagccccctggacaccagcaagcagcccctctgccagctctgggccgagaagcatggcgcccgggggacccatgaggtgcggtacgtctcggccgggcagagcgtggcgtgcggctggtgggccttcgcaccgccgtgcctgcaggtcctcaacacgcccaagggcatcctgttcttcctgtgtgcggccgcattcctgcaggggatgactgtgaatggcttcatcaacacagtcatcacctccctggagcgccgctatgacctgcacagctaccagagcgggctcatcgccagctcctacgacattgccgcctgcctctgcctcaccttcgtcagctacttcgggggctcagggcacaagccgcgctggctgggctggggcgtgctgcttatgggcacggggtcgctggtgttcgcgctgccccacttcacggctggccgctatgaggtggagttggacgcgggtgtcaggacgtgccctgccaaccccggcgcggtgtgtgcggacagcacctcgggcctgtcccgctaccagctggtcttcatgctgggccagttcctgcatggcgtgggtgccacacccctctacacgctgggcgtcacctacctggatgagaacgtcaagtccagctgctcgcccgtctacattgccatcttctacacagcggccatcctgggcccagctgccggctacctgattggaggtgccctgctgaatatctacacggaaatgggccgacggacggagctgaccaccgagagcccactgtgggtcggcgcctggtgggtcggcttcctgggctctggggccgctgctttcttcaccgccgttcccatccttggttaccctcggcagctgccaggctcccagcgctacgcggtcatgagagcggcggaaatgcaccagttgaaggacagcagccgtggggaggcgagcaacccggactttgggaaaaccatcagagacctgcctctctccatctggctcctgctgaagaaccccacgttcatcctgctctgcctggccggggccaccgaggccactctcatcaccggcatgtccacgttcagccccaagttcttggagtcccagttcagcctgagtgcctcagaagctgccaccttgtttgggtacctggtggtgccagcgggtggtggcggcaccttcctgggcggcttctttgtgaacaagctcaggctccggggctccgcggtcatcaagttctgcctgttctgcaccgttgtcagcctgctgggcatcctcgtcttctcactgcactgccccagtgtgcccatggcgggcgtcacagccagctacggcgggagcctcctgcccgaaggccacctgaacctaacggctccctgcaacgctgcctgcagctgccagccagaacactacagccctgtgtgcggctcggacggcctcatgtacttctcactgtgccacgcagggtgccctgcagccacggagacgaatgtggacggccagaaggtgtaccgagactgtagctgtatccctcagaatctttcctctggttttggccatgccactgcagggaaatgcacttcaacttgtcagagaaagcccctccttctggttttcatattcgttgtaattttctttacattcctcagcagcattcctgcactaacggcaactctacgatgtgtccgtgaccctcagagatcctttgccctgggaatccagtggattgtagttagaatactagggggcatcccggggcccatcgccttcggctgggtgatcgacaaggcctgtctgctgtggcaggaccagtgtggccagcagggctcctgcttggtgtaccagaattcggccatgagccgctacatactcatcatggggctcctgtacaagacgataaagcacaaagccttctaaataaaatgcggtcccacggccagctgttcagaggatcttgacgctcttccttgggtgacggacccaggagagttcatcctgcaggaacccgtggcctcaggctttccaggagggaggttagagaaagggaaggagcccagctggttcacctcccctcggattagcagaaaagaggcgagtctgagcagggccttgtgtggctctggagagaagcagtgggttaaggagacatacacctcggtttccccctcatctgaggtttcactttccacagtttcagttaccagaggtccaccacagtctgaatgtattaaataggaaattccagaagcaaacagttcataacctttaaagcacgcgccgttctgcacagtctggtgagatcttgatctgtcctgcccaggactcggattctccctttgtccaactttggaagaaggcaaggtcagaacttattctgcagggagctttggggatattggatactaaggcccaagccctctgtgatacgcctttcgctttggcataaaataacggttgactctctgttaggcgcgtctctgctcagggagtggtggtgtttggggaagcccaaaggcacatgagcatcaggaaattgaccatttgacttcataagacataacctttgtccagcgtgtccaggctattcatgccaccacctgttgatcacttagcagccggtgtggttcccacatcccccatcaccatatcacagtgccatgttcaagccactcttatttacctaatcatggccccaaagcaccggagcactcacgccgccgttcagctctgccaatgggaagccggaggcgcctccttcagcgagaaggtgtagttccttggctgggcttagtactacccttagactcacgcgtccacaggggtctcagtgtctgcggatgagggggctgctgtactttcccagggagccgtccccagactctctctttgctgtgttggatgcatcccttagctgggagcagcaggctgagagccctccacacgcagccatcccctgggctcagcacagccagcgggagccgtatccagagggtcagagttggcctcagcagcgcatgcgtccatgttaattgtagcgggggagcacacggtgtctccttataaacaccctcgcattccactttgtcctgcaccgagtcaaaacagcctcactccctgaatgcaggctcagggccatcagccaggctgacactccaggaggcacagtgggtgtttctggtccacgcccagcgtggaaatcatagtggtgcacatgtactctgcgtgggcattgcggcagcatccgtgcttggacctcaccgcctttggggcccacgtgggattcctgccacatcgtcctcttgccctgcaaagtcggtgcagcccctcattgttgacaaagaaaccaagaccctgaaggttcagaactgcccatgatggtggcaccggggcttgaaccccggctgtggtggtgaccggcgactggctctgtgtgaggttcctgtggccgccacgacaaaggaccgcaagcggggtggcctgatgtagcagaaccagattcgcttgcaggtgggggcagggcgggctccttccgccgctctggctctctgcagctgcatgtggcctttccctctgtccctgcctcaagtcttcctctcctttctctcatgaggacaccagtcattggatttggggcccaccttagatccaggatggtctcatctcaaatccttaattacatctgcaaagaccctatttccaaaaaaggtcccattcactggtgtctggcactgttcaacccatgacaagcccctcagtcctgtgcctctgtttttagtcaaagggtgtgtttcattccctctaacaatattggcgtctgctctacaaaccggttatatgggaaagataccctctcagagcaggatgggtttccgtggacctggtgagggtgctgcaggctggggcagggacaggactgggacaggcccaccagtatccaaaggctctggccgagctccccacgaggtccagcgggctcctctctccccaggtgctgggcgtcctcttctttgccatagcctgcttcttatacaagcccctgtcggagtcttcagatggcctggaaacttgtctgcccagccagtcctcagcccctgacagtgccacagatagccagctccagagcagcgtctgaccaccgcccgcgcccacccggccacggcgggcactcagcatttcctgatgacagaacagtgccgttgggtgatgcaatcacacgggaacttctatttgacctgcaaccttctacttaacctgtggtttaaagtcggctgtgacctcctgtccccagagctgtacggccctgcagtgggtgggaggaacttgcataaatatatatttatggacacacagtttgcatcagaacgtgtttatagaatgtgttttatacccgatcgtgtgtggtgtgcgtgaggacaaactccgcaggggctgtgaatcccactgggagggcggcgggcctgcagcccgaggaaggcttgtgtgtcctcagttaaaactgtgcatatcgaaatatattttgttatttaagcctgcgtccccgt

SEQ ID NO: 1002 - DNA, 4947 bp, Homo sapiens
ctccctctgcggcgggggcggccccagcggatgaatgaagcggcgcgtggctgccggggaggccagagcgtggagcgctgcgcggcgcggcggccgggccctcgagacggggacggacacaccagcccctcggataccacttggccactcccgctgaggccactcccactgcgtggctgaagcctcgaggtcaccaggcggaggcgcggagatgcccctgcatcagctgggggacaagccgctcaccttccccagccccaactcagccatggaaaacgggcttgaccacaccccacccagcaggagggcatccccgggcacacccctgagccccggctccctccgctccgctgcccatagccccctggacaccagcaagcagcccctctgccagctctgggccgagaagcatggcgcccgggggacccatgaggtgcggtacgtctcggccgggcagagcgtggcgtgcggctggtgggccttcgcaccgccgtgcctgcaggtcctcaacacgcccaagggcatcctgttcttcctgtgtgcggccgcattcctgcaggggatgactgtgaatggcttcatcaacacagtcatcacctccctggagcgccgctatgacctgcacagctaccagagcgggctcatcgccagctcctacgacattgccgcctgcctctgcctcaccttcgtcagctacttcgggggctcagggcacaagccgcgctggctgggctggggcgtgctgcttatgggcacggggtcgctggtgttcgcgctgccccacttcacggctggccgctatgaggtggagttggacgcgggtgtcaggacgtgccctgccaaccccggcgcggtgtgtgcggacagcacctcgggcctgtcccgctaccagctggtcttcatgctgggccagttcctgcatggcgtgggtgccacacccctctacacgctgggcgtcacctacctggatgagaacgtcaagtccagctgctcgcccgtctacattgccatcttctacacagcggccatcctgggcccagctgccggctacctgattggaggtgccctgctgaatatctacacggaaatgggccgacggacggagctgaccaccgagagcccactgtgggtcggcgcctggtgggtcggcttcctgggctctggggccgctgctttcttcaccgccgttcccatccttggttaccctcggcagctgccaggctcccagcgctacgcggtcatgagagcggcggaaatgcaccagttgaaggacagcagccgtggggaggcgagcaacccggactttgggaaaaccatcagagacctgcctctctccatctggctcctgctgaagaaccccacgttcatcctgctctgcctggccggggccaccgaggccactctcatcaccggcatgtccacgttcagccccaagttcttggagtcccagttcagcctgagtgcctcagaagctgccaccttgtttgggtacctggtggtgccagcgggtggtggcggcaccttcctgggcggcttctttgtgaacaagctcaggctccggggctccgcggtcatcaagttctgcctgttctgcaccgttgtcagcctgctgggcatcctcgtcttctcactgcactgccccagtgtgcccatggcgggcgtcacagccagctacggcgggagcctcctgcccgaaggccacctgaacctaacggctccctgcaacgctgcctgcagctgccagccagaacactacagccctgtgtgcggctcggacggcctcatgtacttctcactgtgccacgcagggtgccctgcagccacggagacgaatgtggacggccagaaggtgtaccgagactgtagctgtatccctcagaatctttcctctggttttggccatgccactgcagggaaatgcacttcaacttgtcagagaaagcccctccttctggttttcatattcgttgtaattttctttacattcctcagcagcattcctgcactaacggcaactctacgatgtgtccgtgaccctcagagatcctttgccctgggaatccagtggattgtagttagaatactaggtactgtgcagtgtgaggaagccatggtcagttgcacagtgtgctcactgcacaagggcatggggggcatcccggggcccatcgccttcggctgggtgatcgacaaggcctgtctgctgtggcaggaccagtgtggccagcagggctcctgcttggtgtaccagaattcggccatgagccgctacatactcatcatggggctcctgtacaagacgataaagcacaaagccttctaaataaaatgcggtcccacggccagctgttcagaggatcttgacgctcttccttgggtgacggacccaggagagttcatcctgcaggaacccgtggcctcaggctttccaggagggaggttagagaaagggaaggagcccagctggttcacctcccctcggattagcagaaaagaggcgagtctgagcagggccttgtgtggctctggagagaagcagtgggttaaggagacatacacctcggtttccccctcatctgaggtttcactttccacagtttcagttaccagaggtccaccacagtctgaatgtattaaataggaaattccagaagcaaacagttcataacctttaaagcacgcgccgttctgcacagtctggtgagatcttgatctgtcctgcccaggactcggattctccctttgtccaactttggaagaaggcaaggtcagaacttattctgcagggagctttggggatattggatactaaggcccaagccctctgtgatacgcctttcgctttggcataaaataacggttgactctctgttaggcgcgtctctgctcagggagtggtggtgtttggggaagcccaaaggcacatgagcatcaggaaattgaccatttgacttcataagacataacctttgtccagcgtgtccaggctattcatgccaccacctgttgatcacttagcagccggtgtggttcccacatcccccatcaccatatcacagtgccatgttcaagccactcttatttacctaatcatggccccaaagcaccggagcactcacgccgccgttcagctctgccaatgggaagccggaggcgcctccttcagcgagaaggtgtagttccttggctgggcttagtactacccttagactcacgcgtccacaggggtctcagtgtctgcggatgagggggctgctgtactttcccagggagccgtccccagactctctctttgctgtgttggatgcatcccttagctgggagcagcaggctgagagccctccacacgcagccatcccctgggctcagcacagccagcgggagccgtatccagagggtcagagttggcctcagcagcgcatgcgtccatgttaattgtagcgggggagcacacggtgtctccttataaacaccctcgcattccactttgtcctgcaccgagtcaaaacagcctcactccctgaatgcaggctcagggccatcagccaggctgacactccaggaggcacagtgggtgtttctggtccacgcccagcgtggaaatcatagtggtgcacatgtactctgcgtgggcattgcggcagcatccgtgcttggacctcaccgcctttggggcccacgtgggattcctgccacatcgtcctcttgccctgcaaagtcggtgcagcccctcattgttgacaaagaaaccaagaccctgaaggttcagaactgcccatgatggtggcaccggggcttgaaccccggctgtggtggtgaccggcgactggctctgtgtgaggttcctgtggccgccacgacaaaggaccgcaagcggggtggcctgatgtagcagaaccagattcgcttgcaggtgggggcagggcgggctccttccgccgctctggctctctgcagctgcatgtggcctttccctctgtccctgcctcaagtcttcctctcctttctctcatgaggacaccagtcattggatttggggcccaccttagatccaggatggtctcatctcaaatccttaattacatctgcaaagaccctatttccaaaaaaggtcccattcactggtgtctggcactgttcaacccatgacaagcccctcagtcctgtgcctctgtttttagtcaaagggtgtgtttcattccctctaacaatattggcgtctgctctacaaaccggttatatgggaaagataccctctcagagcaggatgggtttccgtggacctggtgagggtgctgcaggctggggcagggacaggactgggacaggcccaccagtatccaaaggctctggccgagctccccacgaggtccagcgggctcctctctccccaggtgctgggcgtcctcttctttgccatagcctgcttcttatacaagcccctgtcggagtcttcagatggcctggaaacttgtctgcccagccagtcctcagcccctgacagtgccacagatagccagctccagagcagcgtctgaccaccgcccgcgcccacccggccacggcgggcactcagcatttcctgatgacagaacagtgccgttgggtgatgcaatcacacgggaacttctatttgacctgcaaccttctacttaacctgtggtttaaagtcggctgtgacctcctgtccccagagctgtacggccctgcagtgggtgggaggaacttgcataaatatatatttatggacacacagtttgcatcagaacgtgtttatagaatgtgttttatacccgatcgtgtgtggtgtgcgtgaggacaaactccgcaggggctgtgaatcccactgggagggcggcgggcctgcagcccgaggaaggcttgtgtgtcctcagttaaaactgtgcatatcgaaatatattttgttatttaagcctgcgtccccgt

SEQ ID NO: 1003 - DNA, 4878 bp, Homo sapiens
ctccctctgcggcgggggcggccccagcggatgaatgaagcggcgcgtggctgccggggaggccagagcgtggagcgctgcgcggcgcggcggccgggccctcgagacggggacggacacaccagcccctcggataccacttggccactcccgctgaggccactcccactgcgtggctgaagcctcgaggtcaccaggcggaggcgcggagatgcccctgcatcagctgggggacaagccgctcaccttccccagccccaactcagccatggaaaacgggcttgaccacaccccacccagcaggagggcatccccgggcacacccctgagccccggctccctccgctccgctgcccatagccccctggacaccagcaagcagcccctctgccagctctgggccgagaagcatggcgcccgggggacccatgaggtgcggtacgtctcggccgggcagagcgtggcgtgcggctggtgggccttcgcaccgccgtgcctgcaggtcctcaacacgcccaagggcatcctgttcttcctgtgtgcggccgcattcctgcaggggatgactgtgaatggcttcatcaacacagtcatcacctccctggagcgccgctatgacctgcacagctaccagagcgggctcatcgccagctcctacgacattgccgcctgcctctgcctcaccttcgtcagctacttcgggggctcagggcacaagccgcgctggctgggctggggcgtgctgcttatgggcacggggtcgctggtgttcgcgctgccccacttcacggctggccgctatgaggtggagttggacgcgggtgtcaggacgtgccctgccaaccccggcgcggtgtgtgcggacagcacctcgggcctgtcccgctaccagctggtcttcatgctgggccagttcctgcatggcgtgggtgccacacccctctacacgctgggcgtcacctacctggatgagaacgtcaagtccagctgctcgcccgtctacattgccatcttctacacagcggccatcctgggcccagctgccggctacctgattggaggtgccctgctgaatatctacacggaaatgggccgacggacggagctgaccaccgagagcccactgtgggtcggcgcctggtgggtcggcttcctgggctctggggccgctgctttcttcaccgccgttcccatccttggttaccctcggcagctgccaggctcccagcgctacgcggtcatgagagcggcggaaatgcaccagttgaaggacagcagccgtggggaggcgagcaacccggactttgggaaaaccatcagagacctgcctctctccatctggctcctgctgaagaaccccacgttcatcctgctctgcctggccggggccaccgaggccactctcatcaccggcatgtccacgttcagccccaagttcttggagtcccagttcagcctgagtgcctcagaagctgccaccttgtttgggtacctggtggtgccagcgggtggtggcggcaccttcctgggcggcttctttgtgaacaagctcaggctccggggctccgcggtcatcaagttctgcctgttctgcaccgttgtcagcctgctgggcatcctcgtcttctcactgcactgccccagtgtgcccatggcgggcgtcacagccagctacggcgggagcctcctgcccgaaggccacctgaacctaacggctccctgcaacgctgcctgcagctgccagccagaacactacagccctgtgtgcggctcggacggcctcatgtacttctcactgtgccacgcagggtgccctgcagccacggagacgaatgtggacggccagaaggtgtaccgagactgtagctgtatccctcagaatctttcctctggttttggccatgccactgcagggaaatgcacttcaacttgtcagagaaagcccctccttctggttttcatattcgttgtaattttctttacattcctcagcagcattcctgcactaacggcaactctacggtaagctggggtcgggtgtgcgcttgtccagagctttccttgcagcaccctgaggcggagctctgcagatcctgagacaggagcactccaggaaacacccaggtctaagcgggcctgtctgtcactggtggcaggagagacctcactgtctctgatctctgacgaggggcttcccacttgggggggggtgatgatgtggctggggactggtccaggaggccactggcctagggggtgacttggcatgcaaccccacttctgtgggtgctgacgctgtggttttctattgcagatgtgtccgtgaccctcagagatcctttgccctgggaatccagtggattgtagttagaatactagggggcatcccggggcccatcgccttcggctgggtgatcgacaaggcctgtctgctgtggcaggaccagtgtggccagcagggctcctgcttggtgtaccagaattcggccatgagccgctacatactcatcatggggctcctgtacaagtttcagttaccagaggtccaccacagtctgaatgtattaaataggaaattccagaagcaaacagttcataacctttaaagcacgcgccgttctgcacagtctggtgagatcttgatctgtcctgcccaggactcggattctccctttgtccaactttggaagaaggcaaggtcagaacttattctgcagggagctttggggatattggatactaaggcccaagccctctgtgatacgcctttcgctttggcataaaataacggttgactctctgttaggcgcgtctctgctcagggagtggtggtgtttggggaagcccaaaggcacatgagcatcaggaaattgaccatttgacttcataagacataacctttgtccagcgtgtccaggctattcatgccaccacctgttgatcacttagcagccggtgtggttcccacatcccccatcaccatatcacagtgccatgttcaagccactcttatttacctaatcatggccccaaagcaccggagcactcacgccgccgttcagctctgccaatgggaagccggaggcgcctccttcagcgagaaggtgtagttccttggctgggcttagtactacccttagactcacgcgtccacaggggtctcagtgtctgcggatgagggggctgctgtactttcccagggagccgtccccagactctctctttgctgtgttggatgcatcccttagctgggagcagcaggctgagagccctccacacgcagccatcccctgggctcagcacagccagcgggagccgtatccagagggtcagagttggcctcagcagcgcatgcgtccatgttaattgtagcgggggagcacacggtgtctccttataaacaccctcgcattccactttgtcctgcaccgagtcaaaacagcctcactccctgaatgcaggctcagggccatcagccaggctgacactccaggaggcacagtgggtgtttctggtccacgcccagcgtggaaatcatagtggtgcacatgtactctgcgtgggcattgcggcagcatccgtgcttggacctcaccgcctttggggcccacgtgggattcctgccacatcgtcctcttgccctgcaaagtcggtgcagcccctcattgttgacaaagaaaccaagaccctgaaggttcagaactgcccatgatggtggcaccggggcttgaaccccggctgtggtggtgaccggcgactggctctgtgtgaggttcctgtggccgccacgacaaaggaccgcaagcggggtggcctgatgtagcagaaccagattcgcttgcaggtgggggcagggcgggctccttccgccgctctggctctctgcagctgcatgtggcctttccctctgtccctgcctcaagtcttcctctcctttctctcatgaggacaccagtcattggatttggggcccaccttagatccaggatggtctcatctcaaatccttaattacatctgcaaagaccctatttccaaaaaaggtcccattcactggtgtctggcactgttcaacccatgacaagcccctcagtcctgtgcctctgtttttagtcaaagggtgtgtttcattccctctaacaatattggcgtctgctctacaaaccggttatatgggaaagataccctctcagagcaggatgggtttccgtggacctggtgagggtgctgcaggctggggcagggacaggactgggacaggcccaccagtatccaaaggctctggccgagctccccacgaggtccagcgggctcctctctccccaggtgctgggcgtcctcttctttgccatagcctgcttcttatacaagcccctgtcggagtcttcagatggcctggaaacttgtctgcccagccagtcctcagcccctgacagtgccacagatagccagctccagagcagcgtctgaccaccgcccgcgcccacccggccacggcgggcactcagcatttcctgatgacagaacagtgccgttgggtgatgcaatcacacgggaacttctatttgacctgcaaccttctacttaacctgtggtttaaagtcggctgtgacctcctgtccccagagctgtacggccctgcagtgggtgggaggaacttgcataaatatatatttatggacacacagtttgcatcagaacgtgtttatagaatgtgttttatacccgatcgtgtgtggtgtgcgtgaggacaaactccgcaggggctgtgaatcccactgggagggcggcgggcctgcagcccgaggaaggcttgtgtgtcctcagttaaaactgtgcatatcgaaatatattttgttatttaagcctgcgtccccgt

SEQ ID NO: 1004 - DNA, 5239 bp, Homo sapiens
ctccctctgcggcgggggcggccccagcggatgaatgaagcggcgcgtggctgccggggaggccagagcgtggagcgctgcgcggcgcggcggccgggccctcgagacggggacggacacaccagcccctcggataccacttggccactcccgctgaggccactcccactgcgtggctgaagcctcgaggtcaccaggcggaggcgcggagatgcccctgcatcagctgggggacaagccgctcaccttccccagccccaactcagccatggaaaacgggcttgaccacaccccacccagcaggagggcatccccgggcacacccctgagccccggctccctccgctccgctgcccatagccccctggacaccagcaagcagcccctctgccagctctgggccgagaagcatggcgcccgggggacccatgaggtgcggtacgtctcggccgggcagagcgtggcgtgcggctggtgggccttcgcaccgccgtgcctgcaggtcctcaacacgcccaagggcatcctgttcttcctgtgtgcggccgcattcctgcaggggatgactgtgaatggcttcatcaacacagtcatcacctccctggagcgccgctatgacctgcacagctaccagagcgggctcatcgccagctcctacgacattgccgcctgcctctgcctcaccttcgtcagctacttcgggggctcagggcacaagccgcgctggctgggctggggcgtgctgcttatgggcacggggtcgctggtgttcgcgctgccccacttcacggctggccgctatgaggtggagttggacgcgggtgtcaggacgtgccctgccaaccccggcgcggtgtgtgcggacagcacctcgggcctgtcccgctaccagctggtcttcatgctgggccagttcctgcatggcgtgggtgccacacccctctacacgctgggcgtcacctacctggatgagaacgtcaagtccagctgctcgcccgtctacattgccatcttctacacagcggccatcctgggcccagctgccggctacctgattggaggtgccctgctgaatatctacacggaaatgggccgacggacggagctgaccaccgagagcccactgtgggtcggcgcctggtgggtcggcttcctgggctctggggccgctgctttcttcaccgccgttcccatccttggttaccctcggcagctgccaggctcccagcgctacgcggtcatgagagcggcggaaatgcaccagttgaaggacagcagccgtggggaggcgagcaacccggactttgggaaaaccatcagagacctgcctctctccatctggctcctgctgaagaaccccacgttcatcctgctctgcctggccggggccaccgaggccactctcatcaccggcatgtccacgttcagccccaagttcttggagtcccagttcagcctgagtgcctcagaagctgccaccttgtttgggtacctggtggtgccagcgggtggtggcggcaccttcctgggcggcttctttgtgaacaagctcaggctccggggctccgcggtcatcaagttctgcctgttctgcaccgttgtcagcctgctgggcatcctcgtcttctcactgcactgccccagtgtgcccatggcgggcgtcacagccagctacggcgggagcctcctgcccgaaggccacctgaacctaacggctccctgcaacgctgcctgcagctgccagccagaacactacagccctgtgtgcggctcggacggcctcatgtacttctcactgtgccacgcagggtgccctgcagccacggagacgaatgtggacggccagaaggtgtaccgagactgtagctgtatccctcagaatctttcctctggttttggccatgccactgcagggaaatgcacttcaacttgtcagagaaagcccctccttctggttttcatattcgttgtaattttctttacattcctcagcagcattcctgcactaacggcaactctacggtaagctggggtcgggtgtgcgcttgtccagagctttccttgcagcaccctgaggcggagctctgcagatcctgagacaggagcactccaggaaacacccaggtctaagcgggcctgtctgtcactggtggcaggagagacctcactgtctctgatctctgacgaggggcttcccacttgggggggggtgatgatgtggctggggactggtccaggaggccactggcctagggggtgacttggcatgcaaccccacttctgtgggtgctgacgctgtggttttctattgcagatgtgtccgtgaccctcagagatcctttgccctgggaatccagtggattgtagttagaatactaggtactgtgcagtgtgaggaagccatggtcagttgcacagtgtgctcactgcacaagggcatggggggcatcccggggcccatcgccttcggctgggtgatcgacaaggcctgtctgctgtggcaggaccagtgtggccagcagggctcctgcttggtgtaccagaattcggccatgagccgctacatactcatcatggggctcctgtacaagacgataaagcacaaagccttctaaataaaatgcggtcccacggccagctgttcagaggatcttgacgctcttccttgggtgacggacccaggagagttcatcctgcaggaacccgtggcctcaggctttccaggagggaggttagagaaagggaaggagcccagctggttcacctcccctcggattagcagaaaagaggcgagtctgagcagggccttgtgtggctctggagagaagcagtgggttaaggagacatacacctcggtttccccctcatctgaggtttcactttccacagtttcagttaccagaggtccaccacagtctgaatgtattaaataggaaattccagaagcaaacagttcataacctttaaagcacgcgccgttctgcacagtctggtgagatcttgatctgtcctgcccaggactcggattctccctttgtccaactttggaagaaggcaaggtcagaacttattctgcagggagctttggggatattggatactaaggcccaagccctctgtgatacgcctttcgctttggcataaaataacggttgactctctgttaggcgcgtctctgctcagggagtggtggtgtttggggaagcccaaaggcacatgagcatcaggaaattgaccatttgacttcataagacataacctttgtccagcgtgtccaggctattcatgccaccacctgttgatcacttagcagccggtgtggttcccacatcccccatcaccatatcacagtgccatgttcaagccactcttatttacctaatcatggccccaaagcaccggagcactcacgccgccgttcagctctgccaatgggaagccggaggcgcctccttcagcgagaaggtgtagttccttggctgggcttagtactacccttagactcacgcgtccacaggggtctcagtgtctgcggatgagggggctgctgtactttcccagggagccgtccccagactctctctttgctgtgttggatgcatcccttagctgggagcagcaggctgagagccctccacacgcagccatcccctgggctcagcacagccagcgggagccgtatccagagggtcagagttggcctcagcagcgcatgcgtccatgttaattgtagcgggggagcacacggtgtctccttataaacaccctcgcattccactttgtcctgcaccgagtcaaaacagcctcactccctgaatgcaggctcagggccatcagccaggctgacactccaggaggcacagtgggtgtttctggtccacgcccagcgtggaaatcatagtggtgcacatgtactctgcgtgggcattgcggcagcatccgtgcttggacctcaccgcctttggggcccacgtgggattcctgccacatcgtcctcttgccctgcaaagtcggtgcagcccctcattgttgacaaagaaaccaagaccctgaaggttcagaactgcccatgatggtggcaccggggcttgaaccccggctgtggtggtgaccggcgactggctctgtgtgaggttcctgtggccgccacgacaaaggaccgcaagcggggtggcctgatgtagcagaaccagattcgcttgcaggtgggggcagggcgggctccttccgccgctctggctctctgcagctgcatgtggcctttccctctgtccctgcctcaagtcttcctctcctttctctcatgaggacaccagtcattggatttggggcccaccttagatccaggatggtctcatctcaaatccttaattacatctgcaaagaccctatttccaaaaaaggtcccattcactggtgtctggcactgttcaacccatgacaagcccctcagtcctgtgcctctgtttttagtcaaagggtgtgtttcattccctctaacaatattggcgtctgctctacaaaccggttatatgggaaagataccctctcagagcaggatgggtttccgtggacctggtgagggtgctgcaggctggggcagggacaggactgggacaggcccaccagtatccaaaggctctggccgagctccccacgaggtccagcgggctcctctctccccaggtgctgggcgtcctcttctttgccatagcctgcttcttatacaagcccctgtcggagtcttcagatggcctggaaacttgtctgcccagccagtcctcagcccctgacagtgccacagatagccagctccagagcagcgtctgaccaccgcccgcgcccacccggccacggcgggcactcagcatttcctgatgacagaacagtgccgttgggtgatgcaatcacacgggaacttctatttgacctgcaaccttctacttaacctgtggtttaaagtcggctgtgacctcctgtccccagagctgtacggccctgcagtgggtgggaggaacttgcataaatatatatttatggacacacagtttgcatcagaacgtgtttatagaatgtgttttatacccgatcgtgtgtggtgtgcgtgaggacaaactccgcaggggctgtgaatcccactgggagggcggcgggcctgcagcccgaggaaggcttgtgtgtcctcagttaaaactgtgcatatcgaaatatattttgttatttaagcctgcgtccccgt

SEQ ID NO: 1005 - DNA, 4906 bp, Homo sapiens
ctccctctgcggcgggggcggccccagcggatgaatgaagcggcgcgtggctgccggggaggccagagcgtggagcgctgcgcggcgcggcggccgggccctcgagacggggacggacacaccagcccctcggataccacttggccactcccgctgaggccactcccactgcgtggctgaagcctcgaggtcaccaggcggaggcgcggagatgcccctgcatcagctgggggacaagccgctcaccttccccagccccaactcagccatggaaaacgggcttgaccacaccccacccagcaggagggcatccccgggcacacccctgagccccggctccctccgctccgctgcccatagccccctggacaccagcaagcagcccctctgccagctctgggccgagaagcatggcgcccgggggacccatgaggtgcggtacgtctcggccgggcagagcgtggcgtgcggctggtgggccttcgcaccgccgtgcctgcaggtcctcaacacgcccaagggcatcctgttcttcctgtgtgcggccgcattcctgcaggggatgactgtgaatggcttcatcaacacagtcatcacctccctggagcgccgctatgacctgcacagctaccagagcgggctcatcgccagctcctacgacattgccgcctgcctctgcctcaccttcgtcagctacttcgggggctcagggcacaagccgcgctggctgggctggggcgtgctgcttatgggcacggggtcgctggtgttcgcgctgccccacttcacggctggccgctatgaggtggagttggacgcgggtgtcaggacgtgccctgccaaccccggcgcggtgtgtgcggacagcacctcgggcctgtcccgctaccagctggtcttcatgctgggccagttcctgcatggcgtgggtgccacacccctctacacgctgggcgtcacctacctggatgagaacgtcaagtccagctgctcgcccgtctacattgccatcttctacacagcggccatcctgggcccagctgccggctacctgattggaggtgccctgctgaatatctacacggaaatgggccgacggacggagctgaccaccgagagcccactgtgggtcggcgcctggtgggtcggcttcctgggctctggggccgctgctttcttcaccgccgttcccatccttggttaccctcggcagctgccaggctcccagcgctacgcggtcatgagagcggcggaaatgcaccagttgaaggacagcagccgtggggaggcgagcaacccggactttgggaaaaccatcagagacctgcctctctccatctggctcctgctgaagaaccccacgttcatcctgctctgcctggccggggccaccgaggccactctcatcaccggcatgtccacgttcagccccaagttcttggagtcccagttcagcctgagtgcctcagaagctgccaccttgtttgggtacctggtggtgccagcgggtggtggcggcaccttcctgggcggcttctttgtgaacaagctcaggctccggggctccgcggtcatcaagttctgcctgttctgcaccgttgtcagcctgctgggcatcctcgtcttctcactgcactgccccagtgtgcccatggcgggcgtcacagccagctacggcgggagcctcctgcccgaaggccacctgaacctaacggctccctgcaacgctgcctgcagctgccagccagaacactacagccctgtgtgcggctcggacggcctcatgtacttctcactgtgccacgcagggtgccctgcagccacggagacgaatgtggacggccagaaggtgtaccgagactgtagctgtatccctcagaatctttcctctggttttggccatgccactgcagggaaatgcacttcaacttgtcagagaaagcccctccttctggttttcatattcgttgtaattttctttacattcctcagcagcattcctgcactaacggcaactctacgatgtgtccgtgaccctcagagatcctttgccctgggaatccagtggattgtagttagaatactagggggcatcccggggcccatcgccttcggctgggtgatcgacaaggcctgtctgctgtggcaggaccagtgtggccagcagggctcctgcttggtgtaccagaattcggccatgagccgctacatactcatcatggggctcctgtacaagtttcagttaccagaggtccaccacagtctgaatgtattaaataggaaattccagaagcaaacagttcataacctttaaagcacgcgccgttctgcacagtctggtgagatcttgatctgtcctgcccaggactcggattctccctttgtccaactttggaagaaggcaaggtcagaacttattctgcagggagctttggggatattggatactaaggcccaagccctctgtgatacgcctttcgctttggcataaaataacggttgactctctgttaggcgcgtctctgctcagggagtggtggtgtttggggaagcccaaaggcacatgagcatcaggaaattgaccatttgacttcataagacataacctttgtccagcgtgtccaggctattcatgccaccacctgttgatcacttagcagccggtgtggttcccacatcccccatcaccatatcacagtgccatgttcaagccactcttatttacctaatcatggccccaaagcaccggagcactcacgccgccgttcagctctgccaatgggaagccggaggcgcctccttcagcgagaaggtgtagttccttggctgggcttagtactacccttagactcacgcgtccacaggggtctcagtgtctgcggatgagggggctgctgtactttcccagggagccgtccccagactctctctttgctgtgttggatgcatcccttagctgggagcagcaggctgagagccctccacacgcagccatcccctgggctcagcacagccagcgggagccgtatccagagggtcagagttggcctcagcagcgcatgcgtccatgttaattgtagcgggggagcacacggtgtctccttataaacaccctcgcattccactttgtcctgcaccgagtcaaaacagcctcactccctgaatgcaggctcagggccatcagccaggctgacactccaggaggcacagtgggtgtttctggtccacgcccagcgtggaaatcatagtggtgcacatgtactctgcgtgggcattgcggcagcatccgtgcttggacctcaccgcctttggggcccacgtgggattcctgccacatcgtcctcttgccctgcaaagtcggtgcagcccctcattgttgacaaagaaaccaagaccctgaaggttcagaactgcccatgatggtggcaccggggcttgaaccccggctgtggtggtgaccggcgactggctctgtgtgaggttcctgtggccgccacgacaaaggaccgcaagcggggtggcctgatgtagcagaaccagattcgcttgcaggtgggggcagggcgggctccttccgccgctctggctctctgcagctgcatgtggcctttccctctgtccctgcctcaagtcttcctctcctttctctcatgaggacaccagtcattggatttggggcccaccttagatccaggatggtctcatctcaaatccttaattacatctgcaaagaccctatttccaaaaaaggtcccattcactggtgtctggcactgttcaacccatgacaagcccctcagtcctgtgcctctgtttttagtcaaagggtgtgtttcattccctctaacaatattggcgtctgctctacaaaccggttatatgggaaagataccctctcagagcaggatgggtttccgtggacctggtgagggtgctgcaggctggggcagggacaggactgggacaggcccaccagtatccaaaggctctggccgagctccccacgaggtccagcgggctcctctctccccaggtgctgggcgtcctcttctttgccatagcctgcttcttatacaagcccctgtcggagtcttcagatggcctggaaacttgtctgcccagccagtcctcagcccctgacagtgccacagatagccagctccagagcagcgtctgaccaccgcccgcgcccacccggccacggcgggcactcagcatttcctgatgacagaacagtgccgttgggtgatgcaatcacacgggaacttctatttgacctgcaaccttctacttaacctgtggtttaaagtcggctgtgacctcctgtccccagagctgtacggccctgcagtgggtgggaggaacttgcataaatatatatttatggacacacagtttgcatcagaacgtgtttatagaatgtgttttatacccgatcgtgtgtggtgtgcgtgaggacaaactccgcaggggctgtgaatcccactgggagggcggcgggcctgcagcccgaggaaggcttgtgtgtcctcagttaaaactgtgcatatcgaaatatattttgttatttaagcctgcgtccccgtaccgcgtgctttatttctatgagtttgcagagtttggtggtctcgccatccttggcccacgtcctgtagtcagccctgtggaatccgcggatatgaaaagttggccttccttatccacaggctcccccgtaagtcggccttccttatccacaggctcccctgctgaggattcatcccaccttggatggaaaatgcagtttttgtgggagatggaactggagggtacggagggctgactgcacatacaaatatacatacatgagtgtacatatgttcttatataaacgtgtcacagtaaaattgttcctcatcttgcgtta

SEQ ID NO: 1006 - DNA, 2594 bp, Homo sapiens
ctccctctgcggcgggggcggccccagcggatgaatgaagcggcgcgtggctgccggggaggccagagcgtggagcgctgcgcggcgcggcggccgggccctcgagacggggacggacacaccagcccctcggataccacttggccactcccgctgaggccactcccactgcgtggctgaagcctcgaggtcaccaggcggaggcgcggagatgcccctgcatcagctgggggacaagccgctcaccttccccagccccaactcagccatggaaaacgggcttgaccacaccccacccagcaggagggcatccccgggcacacccctgagccccggctccctccgctccgctgcccatagccccctggacaccagcaagcagcccctctgccagctctgggccgagaagcatggcgcccgggggacccatgaggtgcggtacgtctcggccgggcagagcgtggcgtgcggctggtgggccttcgcaccgccgtgcctgcaggtcctcaacacgcccaagggcatcctgttcttcctgtgtgcggccgcattcctgcaggggatgactgtgaatggcttcatcaacacagtcatcacctccctggagcgccgctatgacctgcacagctaccagagcgggctcatcgccagctcctacgacattgccgcctgcctctgcctcaccttcgtcagctacttcgggggctcagggcacaagccgcgctggctgggctggggcgtgctgcttatgggcacggggtcgctggtgttcgcgctgccccacttcacggctggccgctatgaggtggagttggacgcgggtgtcaggacgtgccctgccaaccccggcgcggtgtgtgcggacagcacctcgggcctgtcccgctaccagctggtcttcatgctgggccagttcctgcatggcgtgggtgccacacccctctacacgctgggcgtcacctacctggatgagaacgtcaagtccagctgctcgcccgtctacattgccatcttctacacagcggccatcctgggcccagctgccggctacctgattggaggtgccctgctgaatatctacacggaaatgggccgacggacggagctgaccaccgagagcccactgtgggtcggcgcctggtgggtcggcttcctgggctctggggccgctgctttcttcaccgccgttcccatccttggttaccctcggcagctgccaggctcccagcgctacgcggtcatgagagcggcggaaatgcaccagttgaaggacagcagccgtggggaggcgagcaacccggactttgggaaaaccatcagagacctgcctctctccatctggctcctgctgaagaaccccacgttcatcctgctctgcctggccggggccaccgaggccactctcatcaccggcatgtccacgttcagccccaagttcttggagtcccagttcagcctgagtgcctcagaagctgccaccttgtttgggtacctggtggtgccagcgggtggtggcggcaccttcctgggcggcttctttgtgaacaagctcaggctccggggctccgcggtcatcaagttctgcctgttctgcaccgttgtcagcctgctgggcatcctcgtcttctcactgcactgccccagtgtgcccatggcgggcgtcacagccagctacggcgggagcctcctgcccgaaggccacctgaacctaacggctccctgcaacgctgcctgcagctgccagccagaacactacagccctgtgtgcggctcggacggcctcatgtacttctcactgtgccacgcagggtgccctgcagccacggagacgaatgtggacggccagaaggtgtaccgagactgtagctgtatccctcagaatctttcctctggttttggccatgccactgcagggaaatgcacttcaacttgtcagagaaagcccctccttctggttttcatattcgttgtaattttctttacattcctcagcagcattcctgcactaacggcaactctacgatgtgtccgtgaccctcagagatcctttgccctgggaatccagtggattgtagttagaatactagggggcatcccggggcccatcgccttcggctgggtgatcgacaaggcctgtctgctgtggcaggaccagtgtggccagcagggctcctgcttggtgtaccagaattcggccatgagccgctacatactcatcatggggctcctgtacaaggtgctgggcgtcctcttctttgccatagcctgcttcttatacaagcccctgtcggagtcttcagatggcctggaaacttgtctgcccagccagtcctcagcccctgacagtgccacagatagccagctccagagcagcgtctgaccaccgcccgcgcccacccggccacggcgggcactcagcatttcctgatgacagaacagtgccgttgggtgatgcaatcacacgggaacttctatttgacctgcaaccttctacttaacctgtggtttaaagtcggctgtgacctcctgtccccagagctgtacggccctgcagtgggtgggaggaacttgcataaatatatatttatggacac

SEQ ID NO: 1007 - DNA, 4689 bp, Homo sapiens
ctccctctgcggcgggggcggccccagcggatgaatgaagcggcgcgtggctgccggggaggccagagcgtggagcgctgcgcggcgcggcggccgggccctcgagacggggacggacacaccagcccctcggataccacttggccactcccgctgaggccactcccactgcgtggctgaagcctcgaggtcaccaggcggaggcgcggagatgcccctgcatcagctgggggacaagccgctcaccttccccagccccaactcagccatggaaaacgggcttgaccacaccccacccagcaggagggcatccccgggcacacccctgagccccggctccctccgctccgctgcccatagccccctggacaccagcaagcagcccctctgccagctctgggccgagaagcatggcgcccgggggacccatgaggtgcggtacgtctcggccgggcagagcgtggcgtgcggctggtgggccttcgcaccgccgtgcctgcaggtcctcaacacgcccaagggcatcctgttcttcctgtgtgcggccgcattcctgcaggggatgactgtgaatggcttcatcaacacagtcatcacctccctggagcgccgctatgacctgcacagctaccagagcgggctcatcgccagctcctacgacattgccgcctgcctctgcctcaccttcgtcagctacttcgggggctcagggcacaagccgcgctggctgggctggggcgtgctgcttatgggcacggggtcgctggtgttcgcgctgccccacttcacggctggccgctatgaggtggagttggacgcgggtgtcaggacgtgccctgccaaccccggcgcggtgtgtgcggacagcacctcgggcctgtcccgctaccagctggtcttcatgctgggccagttcctgcatggcgtgggtgccacacccctctacacgctgggcgtcacctacctggatgagaacgtcaagtccagctgctcgcccgtctacattgccatcttctacacagcggccatcctgggcccagctgccggctacctgattggaggtgccctgctgaatatctacacggaaatgggccgacggacggagctgaccaccgagagcccactgtgggtcggcgcctggtgggtcggcttcctgggctctggggccgctgctttcttcaccgccgttcccatccttggttaccctcggcagctgccaggctcccagcgctacgcggtcatgagagcggcggaaatgcaccagttgaaggacagcagccgtggggaggcgagcaacccggactttgggaaaaccatcagagacctgcctctctccatctggctcctgctgaagaaccccacgttcatcctgctctgcctggccggggccaccgaggccactctcatcaccggcatgtccacgttcagccccaagttcttggagtcccagttcagcctgagtgcctcagaagctgccaccttgtttgggtacctggtggtgccagcgggtggtggcggcaccttcctgggcggcttctttgtgaacaagctcaggctccggggctccgcggtcatcaagttctgcctgttctgcaccgttgtcagcctgctgggcatcctcgtcttctcactgcactgccccagtgtgcccatggcgggcgtcacagccagctacggcgggagcctcctgcccgaaggccacctgaacctaacggctccctgcaacgctgcctgcagctgccagccagaacactacagccctgtgtgcggctcggacggcctcatgtacttctcactgtgccacgcagggtgccctgcagccacggagacgaatgtggacggccagaaggtgtaccgagactgtagctgtatccctcagaatctttcctctggttttggccatgccactgcagggaaatgcacttcaacttgtcagagaaagcccctccttctggttttcatattcgttgtaattttctttacattcctcagcagcattcctgcactaacggcaactctacgatgtgtccgtgaccctcagagatcctttgccctgggaatccagtggattgtagttagaatactagggggcatcccggggcccatcgccttcggctgggtgatcgacaaggcctgtctgctgtggcaggaccagtgtggccagcagggctcctgcttggtgtaccagaattcggccatgagccgctacatactcatcatggggctcctgtacaagacgataaagcacaaagccttctaaataaaatgcggtcccacggccagctgttcagaggatcttgacgctcttccttgggtgacggacccaggagagttcatcctgcaggaacccgtggcctcaggctttccaggagggaggttagagaaagggaaggagcccagctggttcacctcccctcggattagcagaaaagaggcgagtctgagcagggccttgtgtggctctggagagaagcagtgggttaaggagacatacacctcggtttccccctcatctgaggtttcactttccacagtttcagttaccagaggtccaccacagtctgaatgtattaaataggaaattccagaagcaaacagttcataacctttaaagcacgcgccgttctgcacagtctggtgagatcttgatctgtcctgcccaggactcggattctccctttgtccaactttggaagaaggcaaggtcagaacttattctgcagggagctttggggatattggatactaaggcccaagccctctgtgatacgcctttcgctttggcataaaataacggttgactctctgttaggcgcgtctctgctcagggagtggtggtgtttggggaagcccaaaggcacatgagcatcaggaaattgaccatttgacttcataagacataacctttgtccagcgtgtccaggctattcatgccaccacctgttgatcacttagcagccggtgtggttcccacatcccccatcaccatatcacagtgccatgttcaagccactcttatttacctaatcatggccccaaagcaccggagcactcacgccgccgttcagctctgccaatgggaagccggaggcgcctccttcagcgagaaggtgtagttccttggctgggcttagtactacccttagactcacgcgtccacaggggtctcagtgtctgcggatgagggggctgctgtactttcccagggagccgtccccagactctctctttgctgtgttggatgcatcccttagctgggagcagcaggctgagagccctccacacgcagccatcccctgggctcagcacagccagcgggagccgtatccagagggtcagagttggcctcagcagcgcatgcgtccatgttaattgtagcgggggagcacacggtgtctccttataaacaccctcgcattccactttgtcctgcaccgagtcaaaacagcctcactccctgaatgcaggctcagggccatcagccaggctgacactccaggaggcacagtgggtgtttctggtccacgcccagcgtggaaatcatagtggtgcacatgtactctgcgtgggcattgcggcagcatccgtgcttggacctcaccgcctttggggcccacgtgggattcctgccacatcgtcctcttgccctgcaaagtcggtgcagcccctcattgttgacaaagaaaccaagaccctgaaggttcagaactgcccatgatggtggcaccggggcttgaaccccggctgtggtggtgaccggcgactggctctgtgtgaggttcctgtggccgccacgacaaaggaccgcaagcggggtggcctgatgtagcagaaccagattcgcttgcaggtgggggcagggcgggctccttccgccgctctggctctctgcagctgcatgtggcctttccctctgtccctgcctcaagtcttcctctcctttctctcatgaggacaccagtcattggatttggggcccaccttagatccaggatggtctcatctcaaatccttaattacatctgcaaagaccctatttccaaaaaaggtcccattcactggtgtctggcactgttcaacccatgacaagcccctcagtcctgtgcctctgtttttagtcaaagggtgtgtttcattccctctaacaatattggcgtctgctctacaaaccggttatatgggaaagataccctctcagagcaggatgggtttccgtggacctggtgagggtgctgcaggctggggcagggacaggactgggacaggcccaccagtatccaaaggctctggccgagctccccacgaggtccagcgggctcctctctccccaggtgctgggcgtcctcttctttgccatagcctgcttcttatacaagcccctgtcggagtcttcagatggcctggaaacttgtctgcccagccagtcctcagcccctgacagtgccacagatagccagctccagagcagcgtctgaccaccgcccgcgcccacccggccacggcgggcactcagcatttcctgatgacagaacagtgccgttgggtgatgcaatcacacgggaacttctatttgacctgcaaccttctacttaacctgtggtttaaagtcggctgtgacctcctgtccccagagctgtacggccctgcagtgggtgggaggaacttgcataaatatatatttatggacac

SEQ ID NO: 1008 - DNA, 4979 bp, Homo sapiens
ctccctctgcggcgggggcggccccagcggatgaatgaagcggcgcgtggctgccggggaggccagagcgtggagcgctgcgcggcgcggcggccgggccctcgagacggggacggacacaccagcccctcggataccacttggccactcccgctgaggccactcccactgcgtggctgaagcctcgaggtcaccaggcggaggcgcggagatgcccctgcatcagctgggggacaagccgctcaccttccccagccccaactcagccatggaaaacgggcttgaccacaccccacccagcaggagggcatccccgggcacacccctgagccccggctccctccgctccgctgcccatagccccctggacaccagcaagcagcccctctgccagctctgggccgagaagcatggcgcccgggggacccatgaggtgcggtacgtctcggccgggcagagcgtggcgtgcggctggtgggccttcgcaccgccgtgcctgcaggtcctcaacacgcccaagggcatcctgttcttcctgtgtgcggccgcattcctgcaggggatgactgtgaatggcttcatcaacacagtcatcacctccctggagcgccgctatgacctgcacagctaccagagcgggctcatcgccagctcctacgacattgccgcctgcctctgcctcaccttcgtcagctacttcgggggctcagggcacaagccgcgctggctgggctggggcgtgctgcttatgggcacggggtcgctggtgttcgcgctgccccacttcacggctggccgctatgaggtggagttggacgcgggtgtcaggacgtgccctgccaaccccggcgcggtgtgtgcggacagcacctcgggcctgtcccgctaccagctggtcttcatgctgggccagttcctgcatggcgtgggtgccacacccctctacacgctgggcgtcacctacctggatgagaacgtcaagtccagctgctcgcccgtctacattgccatcttctacacagcggccatcctgggcccagctgccggctacctgattggaggtgccctgctgaatatctacacggaaatgggccgacggacggagctgaccaccgagagcccactgtgggtcggcgcctggtgggtcggcttcctgggctctggggccgctgctttcttcaccgccgttcccatccttggttaccctcggcagctgccaggctcccagcgctacgcggtcatgagagcggcggaaatgcaccagttgaaggacagcagccgtggggaggcgagcaacccggactttgggaaaaccatcagagacctgcctctctccatctggctcctgctgaagaaccccacgttcatcctgctctgcctggccggggccaccgaggccactctcatcaccggcatgtccacgttcagccccaagttcttggagtcccagttcagcctgagtgcctcagaagctgccaccttgtttgggtacctggtggtgccagcgggtggtggcggcaccttcctgggcggcttctttgtgaacaagctcaggctccggggctccgcggtcatcaagttctgcctgttctgcaccgttgtcagcctgctgggcatcctcgtcttctcactgcactgccccagtgtgcccatggcgggcgtcacagccagctacggcgggagcctcctgcccgaaggccacctgaacctaacggctccctgcaacgctgcctgcagctgccagccagaacactacagccctgtgtgcggctcggacggcctcatgtacttctcactgtgccacgcagggtgccctgcagccacggagacgaatgtggacggccagaaggtgagtggagccgctgcctaccgcccctgtcctcccctggaccctgggaaggggcccccgtgccttccccttgtaatcggagctattgttgggcttcccaggtgtaccgagactgtagctgtatccctcagaatctttcctctggttttggccatgccactgcagggaaatgcacttcaacttgtcagagaaagcccctccttctggttttcatattcgttgtaattttctttacattcctcagcagcattcctgcactaacggcaactctacggtaagctggggtcgggtgtgcgcttgtccagagctttccttgcagcaccctgaggcggagctctgcagatcctgagacaggagcactccaggaaacacccaggtctaagcgggcctgtctgtcactggtggcaggagagacctcactgtctctgatctctgacgaggggcttcccacttgggggggggtgatgatgtggctggggactggtccaggaggccactggcctagggggtgacttggcatgcaaccccacttctgtgggtgctgacgctgtggttttctattgcagatgtgtccgtgaccctcagagatcctttgccctgggaatccagtggattgtagttagaatactagggggcatcccggggcccatcgccttcggctgggtgatcgacaaggcctgtctgctgtggcaggaccagtgtggccagcagggctcctgcttggtgtaccagaattcggccatgagccgctacatactcatcatggggctcctgtacaagtttcagttaccagaggtccaccacagtctgaatgtattaaataggaaattccagaagcaaacagttcataacctttaaagcacgcgccgttctgcacagtctggtgagatcttgatctgtcctgcccaggactcggattctccctttgtccaactttggaagaaggcaaggtcagaacttattctgcagggagctttggggatattggatactaaggcccaagccctctgtgatacgcctttcgctttggcataaaataacggttgactctctgttaggcgcgtctctgctcagggagtggtggtgtttggggaagcccaaaggcacatgagcatcaggaaattgaccatttgacttcataagacataacctttgtccagcgtgtccaggctattcatgccaccacctgttgatcacttagcagccggtgtggttcccacatcccccatcaccatatcacagtgccatgttcaagccactcttatttacctaatcatggccccaaagcaccggagcactcacgccgccgttcagctctgccaatgggaagccggaggcgcctccttcagcgagaaggtgtagttccttggctgggcttagtactacccttagactcacgcgtccacaggggtctcagtgtctgcggatgagggggctgctgtactttcccagggagccgtccccagactctctctttgctgtgttggatgcatcccttagctgggagcagcaggctgagagccctccacacgcagccatcccctgggctcagcacagccagcgggagccgtatccagagggtcagagttggcctcagcagcgcatgcgtccatgttaattgtagcgggggagcacacggtgtctccttataaacaccctcgcattccactttgtcctgcaccgagtcaaaacagcctcactccctgaatgcaggctcagggccatcagccaggctgacactccaggaggcacagtgggtgtttctggtccacgcccagcgtggaaatcatagtggtgcacatgtactctgcgtgggcattgcggcagcatccgtgcttggacctcaccgcctttggggcccacgtgggattcctgccacatcgtcctcttgccctgcaaagtcggtgcagcccctcattgttgacaaagaaaccaagaccctgaaggttcagaactgcccatgatggtggcaccggggcttgaaccccggctgtggtggtgaccggcgactggctctgtgtgaggttcctgtggccgccacgacaaaggaccgcaagcggggtggcctgatgtagcagaaccagattcgcttgcaggtgggggcagggcgggctccttccgccgctctggctctctgcagctgcatgtggcctttccctctgtccctgcctcaagtcttcctctcctttctctcatgaggacaccagtcattggatttggggcccaccttagatccaggatggtctcatctcaaatccttaattacatctgcaaagaccctatttccaaaaaaggtcccattcactggtgtctggcactgttcaacccatgacaagcccctcagtcctgtgcctctgtttttagtcaaagggtgtgtttcattccctctaacaatattggcgtctgctctacaaaccggttatatgggaaagataccctctcagagcaggatgggtttccgtggacctggtgagggtgctgcaggctggggcagggacaggactgggacaggcccaccagtatccaaaggctctggccgagctccccacgaggtccagcgggctcctctctccccaggtgctgggcgtcctcttctttgccatagcctgcttcttatacaagcccctgtcggagtcttcagatggcctggaaacttgtctgcccagccagtcctcagcccctgacagtgccacagatagccagctccagagcagcgtctgaccaccgcccgcgcccacccggccacggcgggcactcagcatttcctgatgacagaacagtgccgttgggtgatgcaatcacacgggaacttctatttgacctgcaaccttctacttaacctgtggtttaaagtcggctgtgacctcctgtccccagagctgtacggccctgcagtgggtgggaggaacttgcataaatatatatttatggacacacagtttgcatcagaacgtgtttatagaatgtgttttatacccgatcgtgtgtggtgtgcgtgaggacaaactccgcaggggctgtgaatcccactgggagggcggcgggcctgcagcccgaggaaggcttgtgtgtcctcagttaaaactgtgcatatcgaaatatattttgttatttaagcctgcgtccccgt

SEQ ID NO: 1009 - DNA, 3182 bp, Homo sapiens
ctccctctgcggcgggggcggccccagcggatgaatgaagcggcgcgtggctgccggggaggccagagcgtggagcgctgcgcggcgcggcggccgggccctcgagacggggacggacacaccagcccctcggataccacttggccactcccgctgaggccactcccactgcgtggctgaagcctcgaggtcaccaggcggaggcgcggagatgcccctgcatcagctgggggacaagccgctcaccttccccagccccaactcagccatggaaaacgggcttgaccacaccccacccagcaggagggcatccccgggcacacccctgagccccggctccctccgctccgctgcccatagccccctggacaccagcaagcagcccctctgccagctctgggccgagaagcatggcgcccgggggacccatgaggtgcggtacgtctcggccgggcagagcgtggcgtgcggctggtgggccttcgcaccgccgtgcctgcaggtcctcaacacgcccaagggcatcctgttcttcctgtgtgcggccgcattcctgcaggggatgactgtgaatggcttcatcaacacagtcatcacctccctggagcgccgctatgacctgcacagctaccagagcgggctcatcgccagctcctacgacattgccgcctgcctctgcctcaccttcgtcagctacttcgggggctcagggcacaagccgcgctggctgggctggggcgtgctgcttatgggcacggggtcgctggtgttcgcgctgccccacttcacggctggccgctatgaggtggagttggacgcgggtgtcaggacgtgccctgccaaccccggcgcggtgtgtgcggacagcacctcgggcctgtcccgctaccagctggtcttcatgctgggccagttcctgcatggcgtgggtgccacacccctctacacgctgggcgtcacctacctggatgagaacgtcaagtccagctgctcgcccgtctacattgccatcttctacacagcggccatcctgggcccagctgccggctacctgattggaggtgccctgctgaatatctacacggaaatgggccgacggacggagctgaccaccgagagcccactgtgggtcggcgcctggtgggtcggcttcctgggctctggggccgctgctttcttcaccgccgttcccatccttggttaccctcggcagctgccaggctcccagcgctacgcggtcatgagagcggcggaaatgcaccagttgaaggacagcagccgtggggaggcgagcaacccggactttgggaaaaccatcagagacctgcctctctccatctggctcctgctgaagaaccccacgttcatcctgctctgcctggccggggccaccgaggccactctcatcaccggcatgtccacgttcagccccaagttcttggagtcccagttcagcctgagtgcctcagaagctgccaccttgtttgggtacctggtggtgccagcgggtggtggcggcaccttcctgggcggcttctttgtgaacaagctcaggctccggggctccgcggtcatcaagttctgcctgttctgcaccgttgtcagcctgctgggcatcctcgtcttctcactgcactgccccagtgtgcccatggcgggcgtcacagccagctacggcgggagcctcctgcccgaaggccacctgaacctaacggctccctgcaacgctgcctgcagctgccagccagaacactacagccctgtgtgcggctcggacggcctcatgtacttctcactgtgccacgcagggtgccctgcagccacggagacgaatgtggacggccagaaggtgagtggagccgctgcctaccgcccctgtcctcccctggaccctgggaaggggcccccgtgccttccccttgtaatcggagctattgttgggcttcccaggtgtaccgagactgtagctgtatccctcagaatctttcctctggttttggccatgccactgcagggaaatgcacttcaacttgtcagagaaagcccctccttctggttttcatattcgttgtaattttctttacattcctcagcagcattcctgcactaacggcaactctacggtaagctggggtcgggtgtgcgcttgtccagagctttccttgcagcaccctgaggcggagctctgcagatcctgagacaggagcactccaggaaacacccaggtctaagcgggcctgtctgtcactggtggcaggagagacctcactgtctctgatctctgacgaggggcttcccacttgggggggggtgatgatgtggctggggactggtccaggaggccactggcctagggggtgacttggcatgcaaccccacttctgtgggtgctgacgctgtggttttctattgcagatgtgtccgtgaccctcagagatcctttgccctgggaatccagtggattgtagttagaatactagggggcatcccggggcccatcgccttcggctgggtgatcgacaaggcctgtctgctgtggcaggaccagtgtggccagcagggctcctgcttggtgtaccagaattcggccatgagccgctacatactcatcatggggctcctgtacaaggtgctgggcgtcctcttctttgccatagcctgcttcttatacaagcccctgtcggagtcttcagatggcctggaaacttgtctgcccagccagtcctcagcccctgacagtgccacagatagccagctccagagcagcgtctgaccaccgcccgcgcccacccggccacggcgggcactcagcatttcctgatgacagaacagtgccgttgggtgatgcaatcacacgggaacttctatttgacctgcaaccttctacttaacctgtggtttaaagtcggctgtgacctcctgtccccagagctgtacggccctgcagtgggtgggaggaacttgcataaatatatatttatggacacacagtttgcatcagaacgtgtttatagaatgtgttttatacccgatcgtgtgtggtgtgcgtgaggacaaactccgcaggggctgtgaatcccactgggagggcggcgggcctgcagcccgaggaaggcttgtgtgtcctcagttaaaactgtgcatatcgaaatatattttgttatttaagcctgcgtccccgt

SEQ ID NO: 1010 - DNA, 4413 bp, Homo sapiens
ctccctctgcggcgggggcggccccagcggatgaatgaagcggcgcgtggctgccggggaggccagagcgtggagcgctgcgcggcgcggcggccgggccctcgagacggggacggacacaccagcccctcggataccacttggccactcccgctgaggccactcccactgcgtggctgaagcctcgaggtcaccaggcggaggcgcggagatgcccctgcatcagctgggggacaagccgctcaccttccccagccccaactcagccatggaaaacgggcttgaccacaccccacccagcaggagggcatccccgggcacacccctgagccccggctccctccgctccgctgcccatagccccctggacaccagcaagcagcccctctgccagctctgggccgagaagcatggcgcccgggggacccatgaggtgcggtacgtctcggccgggcagagcgtggcgtgcggctggtgggccttcgcaccgccgtgcctgcaggtcctcaacacgcccaagggcatcctgttcttcctgtgtgcggccgcattcctgcaggggatgactgtgaatggcttcatcaacacagtcatcacctccctggagcgccgctatgacctgcacagctaccagagcgggctcatcgccagctcctacgacattgccgcctgcctctgcctcaccttcgtcagctacttcgggggctcagggcacaagccgcgctggctgggctggggcgtgctgcttatgggcacggggtcgctggtgttcgcgctgccccacttcacggctggccgctatgaggtggagttggacgcgggtgtcaggacgtgccctgccaaccccggcgcggtgtgtgcggacagcacctcgggcctgtcccgctaccagctggtcttcatgctgggccagttcctgcatggcgtgggtgccacacccctctacacgctgggcgtcacctacctggatgagaacgtcaagtccagctgctcgcccgtctacattgccatcttctacacagcggccatcctgggcccagctgccggctacctgattggaggtgccctgctgaatatctacacggaaatgggccgacggacggagctgaccaccgagagcccactgtgggtcggcgcctggtgggtcggcttcctgggctctggggccgctgctttcttcaccgccgttcccatccttggttaccctcggcagctgccaggctcccagcgctacgcggtcatgagagcggcggaaatgcaccagttgaaggacagcagccgtggggaggcgagcaacccggactttgggaaaaccatcagagacctgcctctctccatctggctcctgctgaagaaccccacgttcatcctgctctgcctggccggggccaccgaggccactctcatcaccggcatgtccacgttcagccccaagttcttggagtcccagttcagcctgagtgcctcagaagctgccaccttgtttgggtacctggtggtgccagcgggtggtggcggcaccttcctgggcggcttctttgtgaacaagctcaggctccggggctccgcggtcatcaagttctgcctgttctgcaccgttgtcagcctgctgggcatcctcgtcttctcactgcactgccccagtgtgcccatggcgggcgtcacagccagctacggcgggagcctcctgcccgaaggccacctgaacctaacggctccctgcaacgctgcctgcagctgccagccagaacactacagccctgtgtgcggctcggacggcctcatgtacttctcactgtgccacgcagggtgccctgcagccacggagacgaatgtggacggccagaagatgtgtccgtgaccctcagagatcctttgccctgggaatccagtggattgtagttagaatactagggggcatcccggggcccatcgccttcggctgggtgatcgacaaggcctgtctgctgtggcaggaccagtgtggccagcagggctcctgcttggtgtaccagaattcggccatgagccgctacatactcatcatggggctcctgtacaagtttcagttaccagaggtccaccacagtctgaatgtattaaataggaaattccagaagcaaacagttcataacctttaaagcacgcgccgttctgcacagtctggtgagatcttgatctgtcctgcccaggactcggattctccctttgtccaactttggaagaaggcaaggtcagaacttattctgcagggagctttggggatattggatactaaggcccaagccctctgtgatacgcctttcgctttggcataaaataacggttgactctctgttaggcgcgtctctgctcagggagtggtggtgtttggggaagcccaaaggcacatgagcatcaggaaattgaccatttgacttcataagacataacctttgtccagcgtgtccaggctattcatgccaccacctgttgatcacttagcagccggtgtggttcccacatcccccatcaccatatcacagtgccatgttcaagccactcttatttacctaatcatggccccaaagcaccggagcactcacgccgccgttcagctctgccaatgggaagccggaggcgcctccttcagcgagaaggtgtagttccttggctgggcttagtactacccttagactcacgcgtccacaggggtctcagtgtctgcggatgagggggctgctgtactttcccagggagccgtccccagactctctctttgctgtgttggatgcatcccttagctgggagcagcaggctgagagccctccacacgcagccatcccctgggctcagcacagccagcgggagccgtatccagagggtcagagttggcctcagcagcgcatgcgtccatgttaattgtagcgggggagcacacggtgtctccttataaacaccctcgcattccactttgtcctgcaccgagtcaaaacagcctcactccctgaatgcaggctcagggccatcagccaggctgacactccaggaggcacagtgggtgtttctggtccacgcccagcgtggaaatcatagtggtgcacatgtactctgcgtgggcattgcggcagcatccgtgcttggacctcaccgcctttggggcccacgtgggattcctgccacatcgtcctcttgccctgcaaagtcggtgcagcccctcattgttgacaaagaaaccaagaccctgaaggttcagaactgcccatgatggtggcaccggggcttgaaccccggctgtggtggtgaccggcgactggctctgtgtgaggttcctgtggccgccacgacaaaggaccgcaagcggggtggcctgatgtagcagaaccagattcgcttgcaggtgggggcagggcgggctccttccgccgctctggctctctgcagctgcatgtggcctttccctctgtccctgcctcaagtcttcctctcctttctctcatgaggacaccagtcattggatttggggcccaccttagatccaggatggtctcatctcaaatccttaattacatctgcaaagaccctatttccaaaaaaggtcccattcactggtgtctggcactgttcaacccatgacaagcccctcagtcctgtgcctctgtttttagtcaaagggtgtgtttcattccctctaacaatattggcgtctgctctacaaaccggttatatgggaaagataccctctcagagcaggatgggtttccgtggacctggtgagggtgctgcaggctggggcagggacaggactgggacaggcccaccagtatccaaaggctctggccgagctccccacgaggtccagcgggctcctctctccccaggtgctgggcgtcctcttctttgccatagcctgcttcttatacaagcccctgtcggagtcttcagatggcctggaaacttgtctgcccagccagtcctcagcccctgacagtgccacagatagccagctccagagcagcgtctgaccaccgcccgcgcccacccggccacggcgggcactcagcatttcctgatgacagaacagtgccgttgggtgatgcaatcacacgggaacttctatttgacctgcaaccttctacttaacctgtggtttaaagtcggctgtgacctcctgtccccagagctgtacggccctgcagtgggtgggaggaacttgcataaatatatatttatggacacacagtttgcatcagaacgtgtttatagaatgtgttttatacccgatcgtgtgtggtgtgcgtgaggacaaactccgcaggggctgtgaatcccactgggagggcggcgggcctgcagcccgaggaaggcttgtgtgtcctcagttaaaactgtgcatatcgaaatatattttgttatttaagcctgcgtccccgt

SEQ ID NO: 1011 - DNA, 4741 bp, Homo sapiens
ctccctctgcggcgggggcggccccagcggatgaatgaagcggcgcgtggctgccggggaggccagagcgtggagcgctgcgcggcgcggcggccgggccctcgagacggggacggacacaccagcccctcggataccacttggccactcccgctgaggccactcccactgcgtggctgaagcctcgaggtcaccaggcggaggcgcggagatgcccctgcatcagctgggggacaagccgctcaccttccccagccccaactcagccatggaaaacgggcttgaccacaccccacccagcaggagggcatccccgggcacacccctgagccccggctccctccgctccgctgcccatagccccctggacaccagcaagcagcccctctgccagctctgggccgagaagcatggcgcccgggggacccatgaggtgcggtacgtctcggccgggcagagcgtggcgtgcggctggtgggccttcgcaccgccgtgcctgcaggtcctcaacacgcccaagggcatcctgttcttcctgtgtgcggccgcattcctgcaggggatgactgtgaatggcttcatcaacacagtcatcacctccctggagcgccgctatgacctgcacagctaccagagcgggctcatcgccagctcctacgacattgccgcctgcctctgcctcaccttcgtcagctacttcgggggctcagggcacaagccgcgctggctgggctggggcgtgctgcttatgggcacggggtcgctggtgttcgcgctgccccacttcacggctggccgctatgaggtggagttggacgcgggtgtcaggacgtgccctgccaaccccggcgcggtgtgtgcggacagcacctcgggcctgtcccgctaccagctggtcttcatgctgggccagttcctgcatggcgtgggtgccacacccctctacacgctgggcgtcacctacctggatgagaacgtcaagtccagctgctcgcccgtctacattgccatcttctacacagcggccatcctgggcccagctgccggctacctgattggaggtgccctgctgaatatctacacggaaatgggccgacggacggagctgaccaccgagagcccactgtgggtcggcgcctggtgggtcggcttcctgggctctggggccgctgctttcttcaccgccgttcccatccttggttaccctcggcagctgccaggctcccagcgctacgcggtcatgagagcggcggaaatgcaccagttgaaggacagcagccgtggggaggcgagcaacccggactttgggaaaaccatcagagacctgcctctctccatctggctcctgctgaagaaccccacgttcatcctgctctgcctggccggggccaccgaggccactctcatcaccggcatgtccacgttcagccccaagttcttggagtcccagttcagcctgagtgcctcagaagctgccaccttgtttgggtacctggtggtgccagcgggtggtggcggcaccttcctgggcggcttctttgtgaacaagctcaggctccggggctccgcggtcatcaagttctgcctgttctgcaccgttgtcagcctgctgggcatcctcgtcttctcactgcactgccccagtgtgcccatggcgggcgtcacagccagctacggcgggagcctcctgcccgaaggccacctgaacctaacggctccctgcaacgctgcctgcagctgccagccagaacactacagccctgtgtgcggctcggacggcctcatgtacttctcactgtgccacgcagggtgccctgcagccacggagacgaatgtggacggccagaagcagcattcctgcactaacggcaactctacgatgtgtccgtgaccctcagagatcctttgccctgggaatccagtggattgtagttagaatactagggggcatcccggggcccatcgccttcggctgggtgatcgacaaggcctgtctgctgtggcaggaccagtgtggccagcagggctcctgcttggtgtaccagaattcggccatgagccgctacatactcatcatggggctcctgtacaagacgataaagcacaaagccttctaaataaaatgcggtcccacggccagctgttcagaggatcttgacgctcttccttgggtgacggacccaggagagttcatcctgcaggaacccgtggcctcaggctttccaggagggaggttagagaaagggaaggagcccagctggttcacctcccctcggattagcagaaaagaggcgagtctgagcagggccttgtgtggctctggagagaagcagtgggttaaggagacatacacctcggtttccccctcatctgaggtttcactttccacagtttcagttaccagaggtccaccacagtctgaatgtattaaataggaaattccagaagcaaacagttcataacctttaaagcacgcgccgttctgcacagtctggtgagatcttgatctgtcctgcccaggactcggattctccctttgtccaactttggaagaaggcaaggtcagaacttattctgcagggagctttggggatattggatactaaggcccaagccctctgtgatacgcctttcgctttggcataaaataacggttgactctctgttaggcgcgtctctgctcagggagtggtggtgtttggggaagcccaaaggcacatgagcatcaggaaattgaccatttgacttcataagacataacctttgtccagcgtgtccaggctattcatgccaccacctgttgatcacttagcagccggtgtggttcccacatcccccatcaccatatcacagtgccatgttcaagccactcttatttacctaatcatggccccaaagcaccggagcactcacgccgccgttcagctctgccaatgggaagccggaggcgcctccttcagcgagaaggtgtagttccttggctgggcttagtactacccttagactcacgcgtccacaggggtctcagtgtctgcggatgagggggctgctgtactttcccagggagccgtccccagactctctctttgctgtgttggatgcatcccttagctgggagcagcaggctgagagccctccacacgcagccatcccctgggctcagcacagccagcgggagccgtatccagagggtcagagttggcctcagcagcgcatgcgtccatgttaattgtagcgggggagcacacggtgtctccttataaacaccctcgcattccactttgtcctgcaccgagtcaaaacagcctcactccctgaatgcaggctcagggccatcagccaggctgacactccaggaggcacagtgggtgtttctggtccacgcccagcgtggaaatcatagtggtgcacatgtactctgcgtgggcattgcggcagcatccgtgcttggacctcaccgcctttggggcccacgtgggattcctgccacatcgtcctcttgccctgcaaagtcggtgcagcccctcattgttgacaaagaaaccaagaccctgaaggttcagaactgcccatgatggtggcaccggggcttgaaccccggctgtggtggtgaccggcgactggctctgtgtgaggttcctgtggccgccacgacaaaggaccgcaagcggggtggcctgatgtagcagaaccagattcgcttgcaggtgggggcagggcgggctccttccgccgctctggctctctgcagctgcatgtggcctttccctctgtccctgcctcaagtcttcctctcctttctctcatgaggacaccagtcattggatttggggcccaccttagatccaggatggtctcatctcaaatccttaattacatctgcaaagaccctatttccaaaaaaggtcccattcactggtgtctggcactgttcaacccatgacaagcccctcagtcctgtgcctctgtttttagtcaaagggtgtgtttcattccctctaacaatattggcgtctgctctacaaaccggttatatgggaaagataccctctcagagcaggatgggtttccgtggacctggtgagggtgctgcaggctggggcagggacaggactgggacaggcccaccagtatccaaaggctctggccgagctccccacgaggtccagcgggctcctctctccccaggtgctgggcgtcctcttctttgccatagcctgcttcttatacaagcccctgtcggagtcttcagatggcctggaaacttgtctgcccagccagtcctcagcccctgacagtgccacagatagccagctccagagcagcgtctgaccaccgcccgcgcccacccggccacggcgggcactcagcatttcctgatgacagaacagtgccgttgggtgatgcaatcacacgggaacttctatttgacctgcaaccttctacttaacctgtggtttaaagtcggctgtgacctcctgtccccagagctgtacggccctgcagtgggtgggaggaacttgcataaatatatatttatggacacacagtttgcatcagaacgtgtttatagaatgtgttttatacccgatcgtgtgtggtgtgcgtgaggacaaactccgcaggggctgtgaatcccactgggagggcggcgggcctgcagcccgaggaaggcttgtgtgtcctcagttaaaactgtgcatatcgaaatatattttgttatttaagcctgcgtccccgt

SEQ ID NO: 1012 - DNA, 2698 bp, Homo sapiens
ctccctctgcggcgggggcggccccagcggatgaatgaagcggcgcgtggctgccggggaggccagagcgtggagcgctgcgcggcgcggcggccgggccctcgagacggggacggacacaccagcccctcggataccacttggccactcccgctgaggccactcccactgcgtggctgaagcctcgaggtcaccaggcggaggcgcggagatgcccctgcatcagctgggggacaagccgctcaccttccccagccccaactcagccatggaaaacgggcttgaccacaccccacccagcaggagggcatccccgggcacacccctgagccccggctccctccgctccgctgcccatagccccctggacaccagcaagcagcccctctgccagctctgggccgagaagcatggcgcccgggggacccatgaggtgcggtacgtctcggccgggcagagcgtggcgtgcggctggtgggccttcgcaccgccgtgcctgcaggtcctcaacacgcccaagggcatcctgttcttcctgtgtgcggccgcattcctgcaggggatgactgtgaatggcttcatcaacacagtcatcacctccctggagcgccgctatgacctgcacagctaccagagcgggctcatcgccagctcctacgacattgccgcctgcctctgcctcaccttcgtcagctacttcgggggctcagggcacaagccgcgctggctgggctggggcgtgctgcttatgggcacggggtcgctggtgttcgcgctgccccacttcacggctggccgctatgaggtggagttggacgcgggtgtcaggacgtgccctgccaaccccggcgcggtgtgtgcggacagcacctcgggcctgtcccgctaccagctggtcttcatgctgggccagttcctgcatggcgtgggtgccacacccctctacacgctgggcgtcacctacctggatgagaacgtcaagtccagctgctcgcccgtctacattggacggagctgaccaccgagagcccactgtgggtcggcgcctggtgggtcggcttcctgggctctggggccgctgctttcttcaccgccgttcccatccttggttaccctcggcagctgccaggctcccagcgctacgcggtcatgagagcggcggaaatgcaccagttgaaggacagcagccgtggggaggcgagcaacccggactttgggaaaaccatcagagacctgcctctctccatctggctcctgctgaagaaccccacgttcatcctgctctgcctggccggggccaccgaggccactctcatcaccggcatgtccacgttcagccccaagttcttggagtcccagttcagcctgagtgcctcagaagctgccaccttgtttgggtacctggtggtgccagcgggtggtggcggcaccttcctgggcggcttctttgtgaacaagctcaggctccggggctccgcggtcatcaagttctgcctgttctgcaccgttgtcagcctgctgggcatcctcgtcttctcactgcactgccccagtgtgcccatggcgggcgtcacagccagctacggcgggagcctcctgcccgaaggccacctgaacctaacggctccctgcaacgctgcctgcagctgccagccagaacactacagccctgtgtgcggctcggacggcctcatgtacttctcactgtgccacgcagggtgccctgcagccacggagacgaatgtggacggccagaaggtgtaccgagactgtagctgtatccctcagaatctttcctctggttttggccatgccactgcagggaaatgcacttcaacttgtcagagaaagcccctccttctggttttcatattcgttgtaattttctttacattcctcagcagcattcctgcactaacggcaactctacgatgtgtccgtgaccctcagagatcctttgccctgggaatccagtggattgtagttagaatactagggggcatcccggggcccatcgccttcggctgggtgatcgacaaggcctgtctgctgtggcaggaccagtgtggccagcagggctcctgcttggtgtaccagaattcggccatgagccgctacatactcatcatggggctcctgtacaaggtgctgggcgtcctcttctttgccatagcctgcttcttatacaagcccctgtcggagtcttcagatggcctggaaacttgtctgcccagccagtcctcagcccctgacagtgccacagatagccagctccagagcagcgtctgaccaccgcccgcgcccacccggccacggcgggcactcagcatttcctgatgacagaacagtgccgttgggtgatgcaatcacacgggaacttctatttgacctgcaaccttctacttaacctgtggtttaaagtcggctgtgacctcctgtccccagagctgtacggccctgcagtgggtgggaggaacttgcataaatatatatttatggacacacagtttgcatcagaacgtgtttatagaatgtgttttatacccgatcgtgtgtggtgtgcgtgaggacaaactccgcaggggctgtgaatcccactgggagggcggcgggcctgcagcccgaggaaggcttgtgtgtcctcagttaaaactgtgcatatcgaaatatattttgttatttaagcctgcgtccccgt

SEQ ID NO: 1013 - DNA, 2852 bp, Homo sapiens
ctccctctgcggcgggggcggccccagcggatgaatgaagcggcgcgtggctgccggggaggccagagcgtggagcgctgcgcggcgcggcggccgggccctcgagacggggacggacacaccagcccctcggataccacttggccactcccgctgaggccactcccactgcgtggctgaagcctcgaggtcaccaggcggaggcgcggagatgcccctgcatcagctgggggacaagccgctcaccttccccagccccaactcagccatggaaaacgggcttgaccacaccccacccagcaggagggcatccccgggcacacccctgagccccggctccctccgctccgctgcccatagccccctggacaccagcaagcagcccctctgccagctctgggccgagaagcatggcgcccgggggacccatgaggtgcggtacgtctcggccgggcagagcgtggcgtgcggctggtgggccttcgcaccgccgtgcctgcaggtcctcaacacgcccaagggcatcctgttcttcctgtgtgcggccgcattcctgcaggggatgactgtgaatggcttcatcaacacagtcatcacctccctggagcgccgctatgacctgcacagctaccagagcgggctcatcgccagctcctacgacattgccgcctgcctctgcctcaccttcgtcagctacttcgggggctcagggcacaagccgcgctggctgggctggggcgtgctgcttatgggcacggggtcgctggtgttcgcgctgccccacttcacggctggccgctatgaggtggagttggacgcgggtgtcaggacgtgccctgccaaccccggcgcggtgtgtgcggacagcacctcgggcctgtcccgctaccagctggtcttcatgctgggccagttcctgcatggcgtgggtgccacacccctctacacgctgggcgtcacctacctggatgagaacgtcaagtccagctgctcgcccgtctacattgccatcttctacacagcggccatcctgggcccagctgccggctacctgattggaggtgccctgctgaatatctacacggaaatgggccgacggacggagctgaccaccgagagcccactgtgggtcggcgcctggtgggtcggcttcctgggctctggggccgctgctttcttcaccgccgttcccatccttggttaccctcggcagctgccaggctcccagcgctacgcggtcatgagagcggcggaaatgcaccagttgaaggacagcagccgtggggaggcgagcaacccggactttgggaaaaccatcagagacctgcctctctccatctggctcctgctgaagaaccccacgttcatcctgctctgcctggccggggccaccgaggccactctcatcaccggcatgtccacgttcagccccaagttcttggagtcccagttcagcctgagtgcctcagaagctgccaccttgtttgggtacctggtggtgccagcgggtggtggcggcaccttcctgggcggcttctttgtgaacaagctcaggctccggggctccgcggtcatcaagttctgcctgttctgcaccgttgtcagcctgctgggcatcctcgtcttctcactgcactgccccagtgtgcccatggcgggcgtcacagccagctacggcgggagcctcctgcccgaaggccacctgaacctaacggctccctgcaacgctgcctgcagctgccagccagaacactacagccctgtgtgcggctcggacggcctcatgtacttctcactgtgccacgcagggtgccctgcagccacggagacgaatgtggacggccagaaggtgtaccgagactgtagctgtatccctcagaatctttcctctggttttggccatgccactgcagggaaatgcacttcaacttgtcagagaaagcccctccttctggttttcatattcgttgtaattttctttacattcctcagcagcattcctgcactaacggcaactctacgatgtgtccgtgaccctcagagatcctttgccctgggaatccagtggattgtagttagaatactaggtactgtgcagtgtgaggaagccatggtcagttgcacagtgtgctcactgcacaagggcatggggggcatcccggggcccatcgccttcggctgggtgatcgacaaggcctgtctgctgtggcaggaccagtgtggccagcagggctcctgcttggtgtaccagaattcggccatgagccgctacatactcatcatggggctcctgtacaaggtgctgggcgtcctcttctttgccatagcctgcttcttatacaagcccctgtcggagtcttcagatggcctggaaacttgtctgcccagccagtcctcagcccctgacagtgccacagatagccagctccagagcagcgtctgaccaccgcccgcgcccacccggccacggcgggcactcagcatttcctgatgacagaacagtgccgttgggtgatgcaatcacacgggaacttctatttgacctgcaaccttctacttaacctgtggtttaaagtcggctgtgacctcctgtccccagagctgtacggccctgcagtgggtgggaggaacttgcataaatatatatttatggacacacagtttgcatcagaacgtgtttatagaatgtgttttatacccgatcgtgtgtggtgtgcgtgaggacaaactccgcaggggctgtgaatcccactgggagggcggcgggcctgcagcccgaggaaggcttgtgtgtcctcagttaaaactgtgcatatcgaaatatattttgttatttaagcctgcgtccccgt

SEQ ID NO: 1014 - DNA, 4493 bp, Homo sapiens
ctccctctgcggcgggggcggccccagcggatgaatgaagcggcgcgtggctgccggggaggccagagcgtggagcgctgcgcggcgcggcggccgggccctcgagacggggacggacacaccagcccctcggataccacttggccactcccgctgaggccactcccactgcgtggctgaagcctcgaggtcaccaggcggaggcgcggagatgcccctgcatcagctgggggacaagccgctcaccttccccagccccaactcagccatggaaaacgggcttgaccacaccccacccagcaggagggcatccccgggcacacccctgagccccggctccctccgctccgctgcccatagccccctggacaccagcaagcagcccctctgccagctctgggccgagaagcatggcgcccgggggacccatgaggtgcggtacgtctcggccgggcagagcgtggcgtgcggctggtgggccttcgcaccgccgtgcctgcaggtcctcaacacgcccaagggcatcctgttcttcctgtgtgcggccgcattcctgcaggggatgactgtgaatggcttcatcaacacagtcatcacctccctggagcgccgctatgacctgcacagctaccagagcgggctcatcgccagctcctacgacattgccgcctgcctctgcctcaccttcgtcagctacttcgggggctcagggcacaagccgcgctggctgggctggggcgtgctgcttatgggcacggggtcgctggtgttcgcgctgccccacttcacggctggccgctatgaggtggagttggacgcgggtgtcaggacgtgccctgccaaccccggcgcggtgtgtgcggacagcacctcgggcctgtcccgctaccagctggtcttcatgctgggccagttcctgcatggcgtgggtgccacacccctctacacgctgggcgtcacctacctggatgagaacgtcaagtccagctgctcgcccgtctacattgccatcttctacacagcggccatcctgggcccagctgccggctacctgattggaggtgccctgctgaatatctacacggaaatgggccgacggacggagctgaccaccgagagcccactgtgggtcggcgcctggtgggtcggcttcctgggctctggggccgctgctttcttcaccgccgttcccatccttggttaccctcggcagctgccaggctcccagcgctacgcggtcatgagagcggcggaaatgcaccagttgaaggacagcagccgtggggaggcgagcaacccggactttgggaaaaccatcagagacctgcctctctccatctggctcctgctgaagaaccccacgttcatcctgctctgcctggccggggccaccgaggccactctcatcaccggcatgtccacgttcagccccaagttcttggagtcccagttcagcctgagtgcctcagaagctgccaccttgtttgggtacctggtggtgccagcgggtggtggcggcaccttcctgggcggcttctttgtgaacaagctcaggctccggggctccgcggtcatcaagttctgcctgttctgcaccgttgtcagcctgctgggcatcctcgtcttctcactgcactgccccagtgtgcccatggcgggcgtcacagccagctacggcgggagcctcctgcccgaaggccacctgaacctaacggctccctgcaacgctgcctgcagctgccagccagaacactacagccctgtgtgcggctcggacggcctcatgtacttctcactgtgccacgcagggtgccctgcagccacggagacgaatgtggacggccagaaggtgtaccgagactgtagctgtatccctcagaatctttcctctggttttggccatgccactgcagggaaatgcacttcaacttgtcagagaaagcccctccttctggttttcatattcgttgtaattttctttacattcctcagcagcattcctgcactaacggcaactctacgatgtgtccgtgaccctcagagatcctttgccctgggaatccagtggattgtagttagaatactagggggcatcccggggcccatcgccttcggctgggtgatcgacaaggcctgtctgctgtggcaggaccagtgtggccagcagggctcctgcttggtgtaccagaattcggccatgagccgctacatactcatcatggggctcctgtacaagtttcagttaccagaggtccaccacagtctgaatgtattaaataggaaattccagaagcaaacagttcataacctttaaagcacgcgccgttctgcacagtctggtgagatcttgatctgtcctgcccaggactcggattctccctttgtccaactttggaagaaggcaaggtcagaacttattctgcagggagctttggggatattggatactaaggcccaagccctctgtgatacgcctttcgctttggcataaaataacggttgactctctgttaggcgcgtctctgctcagggagtggtggtgtttggggaagcccaaaggcacatgagcatcaggaaattgaccatttgacttcataagacataacctttgtccagcgtgtccaggctattcatgccaccacctgttgatcacttagcagccggtgtggttcccacatcccccatcaccatatcacagtgccatgttcaagccactcttatttacctaatcatggccccaaagcaccggagcactcacgccgccgttcagctctgccaatgggaagccggaggcgcctccttcagcgagaaggtgtagttccttggctgggcttagtactacccttagactcacgcgtccacaggggtctcagtgtctgcggatgagggggctgctgtactttcccagggagccgtccccagactctctctttgctgtgttggatgcatcccttagctgggagcagcaggctgagagccctccacacgcagccatcccctgggctcagcacagccagcgggagccgtatccagagggtcagagttggcctcagcagcgcatgcgtccatgttaattgtagcgggggagcacacggtgtctccttataaacaccctcgcattccactttgtcctgcaccgagtcaaaacagcctcactccctgaatgcaggctcagggccatcagccaggctgacactccaggaggcacagtgggtgtttctggtccacgcccagcgtggaaatcatagtggtgcacatgtactctgcgtgggcattgcggcagcatccgtgcttggacctcaccgcctttggggcccacgtgggattcctgccacatcgtcctcttgccctgcaaagtcggtgcagcccctcattgttgacaaagaaaccaagaccctgaaggttcagaactgcccatgatggtggcaccggggcttgaaccccggctgtggtggtgaccggcgactggctctgtgtgaggttcctgtggccgccacgacaaaggaccgcaagcggggtggcctgatgtagcagaaccagattcgcttgcaggtgggggcagggcgggctccttccgccgctctggctctctgcagctgcatgtggcctttccctctgtccctgcctcaagtcttcctctcctttctctcatgaggacaccagtcattggatttggggcccaccttagatccaggatggtctcatctcaaatccttaattacatctgcaaagaccctatttccaaaaaaggtcccattcactggtgtctggcactgttcaacccatgacaagcccctcagtcctgtgcctctgtttttagtcaaagggtgtgtttcattccctctaacaatattggcgtctgctctacaaaccggttatatgggaaagataccctctcagagcaggatgggtttccgtggacctggtgagggtgctgcaggctggggcagggacaggactgggacaggcccaccagtatccaaaggctctggccgagctccccacgaggtccagcgggctcctctctccccagtcctcagcccctgacagtgccacagatagccagctccagagcagcgtctgaccaccgcccgcgcccacccggccacggcgggcactcagcatttcctgatgacagaacagtgccgttgggtgatgcaatcacacgggaacttctatttgacctgcaaccttctacttaacctgtggtttaaagtcggctgtgacctcctgtccccagagctgtacggccctgcagtgggtgggaggaacttgcataaatatatatttatggacacacagtttgcatcagaacgtgtttatagaatgtgttttatacccgatcgtgtgtggtgtgcgtgaggacaaactccgcaggggctgtgaatcccactgggagggcggcgggcctgcagcccgaggaaggcttgtgtgtcctcagttaaaactgtgcatatcgaaatatattttgttatttaagcctgcgtccccgt

SEQ ID NO: 1015 - DNA, 2616 bp, Homo sapiens
ctccctctgcggcgggggcggccccagcggatgaatgaagcggcgcgtggctgccggggaggccagagcgtggagcgctgcgcggcgcggcggccgggccctcgagacggggacggacacaccagcccctcggataccacttggccactcccgctgaggccactcccactgcgtggctgaagcctcgaggtcaccaggcggaggcgcggagatgcccctgcatcagctgggggacaagccgctcaccttccccagccccaactcagccatggaaaacgggcttgaccacaccccacccagcaggagggcatccccgggcacacccctgagccccggctccctccgctccgctgcccatagccccctggacaccagcaagcagcccctctgccagctctgggccgagaagcatggcgcccgggggacccatgaggtgcggtacgtctcggccgggcagagcgtggcgtgcggctggtgggccttcgcaccgccgtgcctgcaggtcctcaacacgcccaagggcatcctgttcttcctgtgtgcggccgcattcctgcaggggatgactgtgaatggcttcatcaacacagtcatcacctccctggagcgccgctatgacctgcacagctaccagagcgggctcatcgccagctcctacgacattgccgcctgcctctgcctcaccttcgtcagctacttcgggggctcagggcacaagccgcgctggctgggctggggcgtgctgcttatgggcacggggtcgctggtgttcgcgctgccccacttcacggctggccgctatgaggtggagttggacgcgggtgtcaggacgtgccctgccaaccccggcgcggtgtgtgcggacagcacctcgggcctgtcccgctaccagctggtcttcatgctgggccagttcctgcatggcgtgggtgccacacccctctacacgctgggcgtcacctacctggatgagaacgtcaagtccagctgctcgcccgtctacattgccatcttctacacagcggccatcctgggcccagctgccggctacctgattggaggtgccctgctgaatatctacacggaaatgggccgacggacggagctgaccaccgagagcccactgtgggtcggcgcctggtgggtcggcttcctgggctctggggccgctgctttcttcaccgccgttcccatccttggttaccctcggcagctgccaggctcccagcgctacgcggtcatgagagcggcggaaatgcaccagttgaaggacagcagccgtggggaggcgagcaacccggactttgggaaaaccatcagagacctgcctctctccatctggctcctgctgaagaaccccacgttcatcctgctctgcctggccggggccaccgaggccactctcatcaccggcatgtccacgttcagccccaagttcttggagtcccagttcagcctgagtgcctcagaagctgccaccttgtttgggtacctggtggtgccagcgggtggtggcggcaccttcctgggcggcttctttgtgaacaagctcaggctccggggctccgcggtcatcaagttctgcctgttctgcaccgttgtcagcctgctgggcatcctcgtcttctcactgcactgccccagtgtgcccatggcgggcgtcacagccagctacggcgggagcctcctgcccgaaggccacctgaacctaacggctccctgcaacgctgcctgcagctgccagccagaacactacagccctgtgtgcggctcggacggcctcatgtacttctcactgtgccacgcagggtgccctgcagccacggagacgaatgtggacggccagaagatgtgtccgtgaccctcagagatcctttgccctgggaatccagtggattgtagttagaatactagggggcatcccggggcccatcgccttcggctgggtgatcgacaaggcctgtctgctgtggcaggaccagtgtggccagcagggctcctgcttggtgtaccagaattcggccatgagccgctacatactcatcatggggctcctgtacaaggtgctgggcgtcctcttctttgccatagcctgcttcttatacaagcccctgtcggagtcttcagatggcctggaaacttgtctgcccagccagtcctcagcccctgacagtgccacagatagccagctccagagcagcgtctgaccaccgcccgcgcccacccggccacggcgggcactcagcatttcctgatgacagaacagtgccgttgggtgatgcaatcacacgggaacttctatttgacctgcaaccttctacttaacctgtggtttaaagtcggctgtgacctcctgtccccagagctgtacggccctgcagtgggtgggaggaacttgcataaatatatatttatggacacacagtttgcatcagaacgtgtttatagaatgtgttttatacccgatcgtgtgtggtgtgcgtgaggacaaactccgcaggggctgtgaatcccactgggagggcggcgggcctgcagcccgaggaaggcttgtgtgtcctcagttaaaactgtgcatatcgaaatatattttgttatttaagcctgcgtccccgt

SEQ ID NO: 1016 - DNA, 2646 bp, Homo sapiens
ctccctctgcggcgggggcggccccagcggatgaatgaagcggcgcgtggctgccggggaggccagagcgtggagcgctgcgcggcgcggcggccgggccctcgagacggggacggacacaccagcccctcggataccacttggccactcccgctgaggccactcccactgcgtggctgaagcctcgaggtcaccaggcggaggcgcggagatgcccctgcatcagctgggggacaagccgctcaccttccccagccccaactcagccatggaaaacgggcttgaccacaccccacccagcaggagggcatccccgggcacacccctgagccccggctccctccgctccgctgcccatagccccctggacaccagcaagcagcccctctgccagctctgggccgagaagcatggcgcccgggggacccatgaggtgcggtacgtctcggccgggcagagcgtggcgtgcggctggtgggccttcgcaccgccgtgcctgcaggtcctcaacacgcccaagggcatcctgttcttcctgtgtgcggccgcattcctgcaggggatgactgtgaatggcttcatcaacacagtcatcacctccctggagcgccgctatgacctgcacagctaccagagcgggctcatcgccagctcctacgacattgccgcctgcctctgcctcaccttcgtcagctacttcgggggctcagggcacaagccgcgctggctgggctggggcgtgctgcttatgggcacggggtcgctggtgttcgcgctgccccacttcacggctggccgctatgaggtggagttggacgcgggtgtcaggacgtgccctgccaaccccggcgcggtgtgtgcggacagcacctcgggcctgtcccgctaccagctggtcttcatgctgggccagttcctgcatggcgtgggtgccacacccctctacacgctgggcgtcacctacctggatgagaacgtcaagtccagctgctcgcccgtctacattgccatcttctacacagcggccatcctgggcccagctgccggctacctgattggaggtgccctgctgaatatctacacggaaatgggccgacggacggagctgaccaccgagagcccactgtgggtcggcgcctggtgggtcggcttcctgggctctggggccgctgctttcttcaccgccgttcccatccttggttaccctcggcagctgccaggctcccagcgctacgcggtcatgagagcggcggaaatgcaccagttgaaggacagcagccgtggggaggcgagcaacccggactttgggaaaaccatcagagacctgcctctctccatctggctcctgctgaagaaccccacgttcatcctgctctgcctggccggggccaccgaggccactctcatcaccggcatgtccacgttcagccccaagttcttggagtcccagttcagcctgagtgcctcagaagctgccaccttgtttgggtacctggtggtgccagcgggtggtggcggcaccttcctgggcggcttctttgtgaacaagctcaggctccggggctccgcggtcatcaagttctgcctgttctgcaccgttgtcagcctgctgggcatcctcgtcttctcactgcactgccccagtgtgcccatggcgggcgtcacagccagctacggcgggagcctcctgcccgaaggccacctgaacctaacggctccctgcaacgctgcctgcagctgccagccagaacactacagccctgtgtgcggctcggacggcctcatgtacttctcactgtgccacgcagggtgccctgcagccacggagacgaatgtggacggccagaagcagcattcctgcactaacggcaactctacgatgtgtccgtgaccctcagagatcctttgccctgggaatccagtggattgtagttagaatactagggggcatcccggggcccatcgccttcggctgggtgatcgacaaggcctgtctgctgtggcaggaccagtgtggccagcagggctcctgcttggtgtaccagaattcggccatgagccgctacatactcatcatggggctcctgtacaaggtgctgggcgtcctcttctttgccatagcctgcttcttatacaagcccctgtcggagtcttcagatggcctggaaacttgtctgcccagccagtcctcagcccctgacagtgccacagatagccagctccagagcagcgtctgaccaccgcccgcgcccacccggccacggcgggcactcagcatttcctgatgacagaacagtgccgttgggtgatgcaatcacacgggaacttctatttgacctgcaaccttctacttaacctgtggtttaaagtcggctgtgacctcctgtccccagagctgtacggccctgcagtgggtgggaggaacttgcataaatatatatttatggacacacagtttgcatcagaacgtgtttatagaatgtgttttatacccgatcgtgtgtggtgtgcgtgaggacaaactccgcaggggctgtgaatcccactgggagggcggcgggcctgcagcccgaggaaggcttgtgtgtcctcagttaaaactgtgcatatcgaaatatattttgttatttaagcctgcgtccccgt

SEQ ID NO: 1017 - DNA, 2959 bp, Homo sapiens
ctccctctgcggcgggggcggccccagcggatgaatgaagcggcgcgtggctgccggggaggccagagcgtggagcgctgcgcggcgcggcggccgggccctcgagacggggacggacacaccagcccctcggataccacttggccactcccgctgaggccactcccactgcgtggctgaagcctcgaggtcaccaggcggaggcgcggagatgcccctgcatcagctgggggacaagccgctcaccttccccagccccaactcagccatggaaaacgggcttgaccacaccccacccagcaggagggcatccccgggcacacccctgagccccggctccctccgctccgctgcccatagccccctggacaccagcaagcagcccctctgccagctctgggccgagaagcatggcgcccgggggacccatgaggtgcggtacgtctcggccgggcagagcgtggcgtgcggctggtgggccttcgcaccgccgtgcctgcaggtcctcaacacgcccaagggcatcctgttcttcctgtgtgcggccgcattcctgcaggggatgactgtgaatggcttcatcaacacagtcatcacctccctggagcgccgctatgacctgcacagctaccagagcgggctcatcgccagctcctacgacattgccgcctgcctctgcctcaccttcgtcagctacttcgggggctcagggcacaagccgcgctggctgggctggggcgtgctgcttatgggcacggggtcgctggtgttcgcgctgccccacttcacggctggccgctatgaggtggagttggacgcgggtgtcaggacgtgccctgccaaccccggcgcggtgtgtgcggacagcacctcgggcctgtcccgctaccagctggtcttcatgctgggccagttcctgcatggcgtgggtgccacacccctctacacgctgggcgtcacctacctggatgagaacgtcaagtccagctgctcgcccgtctacattgccatcttctacacagcggccatcctgggcccagctgccggctacctgattggaggtgccctgctgaatatctacacggaaatgggccgacggacggagctgaccaccgagagcccactgtgggtcggcgcctggtgggtcggcttcctgggctctggggccgctgctttcttcaccgccgttcccatccttggttaccctcggcagctgccaggctcccagcgctacgcggtcatgagagcggcggaaatgcaccagttgaaggacagcagccgtggggaggcgagcaacccggactttgggaaaaccatcagagacctgcctctctccatctggctcctgctgaagaaccccacgttcatcctgctctgcctggccggggccaccgaggccactctcatcaccggcatgtccacgttcagccccaagttcttggagtcccagttcagcctgagtgcctcagaagctgccaccttgtttgggtacctggtggtgccagcgggtggtggcggcaccttcctgggcggcttctttgtgaacaagctcaggctccggggctccgcggtcatcaagttctgcctgttctgcaccgttgtcagcctgctgggcatcctcgtcttctcactgcactgccccagtgtgcccatggcgggcgtcacagccagctacggcgggagcctcctgcccgaaggccacctgaacctaacggctccctgcaacgctgcctgcagctgccagccagaacactacagccctgtgtgcggctcggacggcctcatgtacttctcactgtgccacgcagggtgccctgcagccacggagacgaatgtggacggccagaaggtgtaccgagactgtagctgtatccctcagaatctttcctctggttttggccatgccactgcagggaaatgcacttcaacttgtcagagaaagcccctccttctggttttcatattcgttgtaattttctttacattcctcagcagcattcctgcactaacggcaactctacgatgtgtccgtgaccctcagagatcctttgccctgggaatccagtggattgtagttagaatactagggggcatcccggggcccatcgccttcggctgggtgatcgacaaggcctgtctgctgtggcaggaccagtgtggccagcagggctcctgcttggtgtaccagaattcggccatgagccgctacatactcatcatggggctcctgtacaagtttcagttaccagaggtccaccacagtctgaatgtattaaataggaaattccagaagcaaacagttcataacctttaaagcacgcgccgttctgcacagtctggtgagatcttgatctgtcctgcccaggactcggattctccctttgtccaactttggaagaaggcaaggtgctgggcgtcctcttctttgccatagcctgcttcttatacaagcccctgtcggagtcttcagatggcctggaaacttgtctgcccagccagtcctcagcccctgacagtgccacagatagccagctccagagcagcgtctgaccaccgcccgcgcccacccggccacggcgggcactcagcatttcctgatgacagaacagtgccgttgggtgatgcaatcacacgggaacttctatttgacctgcaaccttctacttaacctgtggtttaaagtcggctgtgacctcctgtccccagagctgtacggccctgcagtgggtgggaggaacttgcataaatatatatttatggacacacagtttgcatcagaacgtgtttatagaatgtgttttatacccgatcgtgtgtggtgtgcgtgaggacaaactccgcaggggctgtgaatcccactgggagggcggcgggcctgcagcccgaggaaggcttgtgtgtcctcagttaaaactgtgcatatcgaaatatattttgttatttaagcctgcgtccccgt

SEQ ID NO: 1018 - DNA, 2929 bp, Homo sapiens
ctccctctgcggcgggggcggccccagcggatgaatgaagcggcgcgtggctgccggggaggccagagcgtggagcgctgcgcggcgcggcggccgggccctcgagacggggacggacacaccagcccctcggataccacttggccactcccgctgaggccactcccactgcgtggctgaagcctcgaggtcaccaggcggaggcgcggagatgcccctgcatcagctgggggacaagccgctcaccttccccagccccaactcagccatggaaaacgggcttgaccacaccccacccagcaggagggcatccccgggcacacccctgagccccggctccctccgctccgctgcccatagccccctggacaccagcaagcagcccctctgccagctctgggccgagaagcatggcgcccgggggacccatgaggtgcggtacgtctcggccgggcagagcgtggcgtgcggctggtgggccttcgcaccgccgtgcctgcaggtcctcaacacgcccaagggcatcctgttcttcctgtgtgcggccgcattcctgcaggggatgactgtgaatggcttcatcaacacagtcatcacctccctggagcgccgctatgacctgcacagctaccagagcgggctcatcgccagctcctacgacattgccgcctgcctctgcctcaccttcgtcagctacttcgggggctcagggcacaagccgcgctggctgggctggggcgtgctgcttatgggcacggggtcgctggtgttcgcgctgccccacttcacggctggccgctatgaggtggagttggacgcgggtgtcaggacgtgccctgccaaccccggcgcggtgtgtgcggacagcacctcgggcctgtcccgctaccagctggtcttcatgctgggccagttcctgcatggcgtgggtgccacacccctctacacgctgggcgtcacctacctggatgagaacgtcaagtccagctgctcgcccgtctacattgccatcttctacacagcggccatcctgggcccagctgccggctacctgattggaggtgccctgctgaatatctacacggaaatgggccgacggacggagctgaccaccgagagcccactgtgggtcggcgcctggtgggtcggcttcctgggctctggggccgctgctttcttcaccgccgttcccatccttggttaccctcggcagctgccaggctcccagcgctacgcggtcatgagagcggcggaaatgcaccagttgaaggacagcagccgtggggaggcgagcaacccggactttgggaaaaccatcagagacctgcctctctccatctggctcctgctgaagaaccccacgttcatcctgctctgcctggccggggccaccgaggccactctcatcaccggcatgtccacgttcagccccaagttcttggagtcccagttcagcctgagtgcctcagaagctgccaccttgtttgggtacctggtggtgccagcgggtggtggcggcaccttcctgggcggcttctttgtgaacaagctcaggctccggggctccgcggtcatcaagttctgcctgttctgcaccgttgtcagcctgctgggcatcctcgtcttctcactgcactgccccagtgtgcccatggcgggcgtcacagccagctacggcgggagcctcctgcccgaaggccacctgaacctaacggctccctgcaacgctgcctgcagctgccagccagaacactacagccctgtgtgcggctcggacggcctcatgtacttctcactgtgccacgcagggtgccctgcagccacggagacgaatgtggacggccagaaggtgtaccgagactgtagctgtatccctcagaatctttcctctggttttggccatgccactgcagggaaatgcacttcaacttgtcagagaaagcccctccttctggttttcatattcgttgtaattttctttacattcctcagcagcattcctgcactaacggcaactctacgatgtgtccgtgaccctcagagatcctttgccctgggaatccagtggattgtagttagaatactagggggcatcccggggcccatcgccttcggctgggtgatcgacaaggcctgtctgctgtggcaggaccagtgtggccagcagggctcctgcttggtgtaccagaattcggccatgagccgctacatactcatcatggggctcctgtacaagacgataaagcacaaagccttctaaataaaatgcggtcccacggccagctgttcagaggatcttgacgctcttccttgggtgacggacccaggagagttcatcctgcaggaacccgtggcctcaggctttccaggagggaggtgctgggcgtcctcttctttgccatagcctgcttcttatacaagcccctgtcggagtcttcagatggcctggaaacttgtctgcccagccagtcctcagcccctgacagtgccacagatagccagctccagagcagcgtctgaccaccgcccgcgcccacccggccacggcgggcactcagcatttcctgatgacagaacagtgccgttgggtgatgcaatcacacgggaacttctatttgacctgcaaccttctacttaacctgtggtttaaagtcggctgtgacctcctgtccccagagctgtacggccctgcagtgggtgggaggaacttgcataaatatatatttatggacacacagtttgcatcagaacgtgtttatagaatgtgttttatacccgatcgtgtgtggtgtgcgtgaggacaaactccgcaggggctgtgaatcccactgggagggcggcgggcctgcagcccgaggaaggcttgtgtgtcctcagttaaaactgtgcatatcgaaatatattttgttatttaagcctgcgtccccgt

SEQ ID NO: 1019 - DNA, 2786 bp, Homo sapiens
ctccctctgcggcgggggcggccccagcggatgaatgaagcggcgcgtggctgccggggaggccagagcgtggagcgctgcgcggcgcggcggccgggccctcgagacggggacggacacaccagcccctcggataccacttggccactcccgctgaggccactcccactgcgtggctgaagcctcgaggtcaccaggcggaggcgcggagatgcccctgcatcagctgggggacaagccgctcaccttccccagccccaactcagccatggaaaacgggcttgaccacaccccacccagcaggagggcatccccgggcacacccctgagccccggctccctccgctccgctgcccatagccccctggacaccagcaagcagcccctctgccagctctgggccgagaagcatggcgcccgggggacccatgaggtgcggtacgtctcggccgggcagagcgtggcgtgcggctggtgggccttcgcaccgccgtgcctgcaggtcctcaacacgcccaagggcatcctgttcttcctgtgtgcggccgcattcctgcaggggatgactgtgaatggcttcatcaacacagtcatcacctccctggagcgccgctatgacctgcacagctaccagagcgggctcatcgccagctcctacgacattgccgcctgcctctgcctcaccttcgtcagctacttcgggggctcagggcacaagccgcgctggctgggctggggcgtgctgcttatgggcacggggtcgctggtgttcgcgctgccccacttcacggctggccgctatgaggtggagttggacgcgggtgtcaggacgtgccctgccaaccccggcgcggtgtgtgcggacagcacctcgggcctgtcccgctaccagctggtcttcatgctgggccagttcctgcatggcgtgggtgccacacccctctacacgctgggcgtcacctacctggatgagaacgtcaagtccagctgctcgcccgtctacattgccatcttctacacagcggccatcctgggcccagctgccggctacctgattggaggtgccctgctgaatatctacacggaaatgggccgacggacggagctgaccaccgagagcccactgtgggtcggcgcctggtgggtcggcttcctgggctctggggccgctgctttcttcaccgccgttcccatccttggttaccctcggcagctgccaggctcccagcgctacgcggtcatgagagcggcggaaatgcaccagttgaaggacagcagccgtggggaggcgagcaacccggactttgggaaaaccatcagagacctgcctctctccatctggctcctgctgaagaaccccacgttcatcctgctctgcctggccggggccaccgaggccactctcatcaccggcatgtccacgttcagccccaagttcttggagtcccagttcagcctgagtgcctcagaagctgccaccttgtttgggtacctggtggtgccagcgggtggtggcggcaccttcctgggcggcttctttgtgaacaagctcaggctccggggctccgcggtcatcaagttctgcctgttctgcaccgttgtcagcctgctgggcatcctcgtcttctcactgcactgccccagtgtgcccatggcgggcgtcacagccagctacggcgggagcctcctgcccgaaggccacctgaacctaacggctccctgcaacgctgcctgcagctgccagccagaacactacagccctgtgtgcggctcggacggcctcatgtacttctcactgtgccacgcagggtgccctgcagccacggagacgaatgtggacggccagaagatgtgtccgtgaccctcagagatcctttgccctgggaatccagtggattgtagttagaatactagggggcatcccggggcccatcgccttcggctgggtgatcgacaaggcctgtctgctgtggcaggaccagtgtggccagcagggctcctgcttggtgtaccagaattcggccatgagccgctacatactcatcatggggctcctgtacaagtttcagttaccagaggtccaccacagtctgaatgtattaaataggaaattccagaagcaaacagttcataacctttaaagcacgcgccgttctgcacagtctggtgagatcttgatctgtcctgcccaggactcggattctccctttgtccaactttggaagaaggcaaggtgctgggcgtcctcttctttgccatagcctgcttcttatacaagcccctgtcggagtcttcagatggcctggaaacttgtctgcccagccagtcctcagcccctgacagtgccacagatagccagctccagagcagcgtctgaccaccgcccgcgcccacccggccacggcgggcactcagcatttcctgatgacagaacagtgccgttgggtgatgcaatcacacgggaacttctatttgacctgcaaccttctacttaacctgtggtttaaagtcggctgtgacctcctgtccccagagctgtacggccctgcagtgggtgggaggaacttgcataaatatatatttatggacacacagtttgcatcagaacgtgtttatagaatgtgttttatacccgatcgtgtgtggtgtgcgtgaggacaaactccgcaggggctgtgaatcccactgggagggcggcgggcctgcagcccgaggaaggcttgtgtgtcctcagttaaaactgtgcatatcgaaatatattttgttatttaagcctgcgtccccgt

SEQ ID NO: 1020 - DNA, 2420 bp, Homo sapiens
ctccctctgcggcgggggcggccccagcggatgaatgaagcggcgcgtggctgccggggaggccagagcgtggagcgctgcgcggcgcggcggccgggccctcgagacggggacggacacaccagcccctcggataccacttggccactcccgctgaggccactcccactgcgtggctgaagcctcgaggtcaccaggcggaggcgcggagatgcccctgcatcagctgggggacaagccgctcaccttccccagccccaactcagccatggaaaacgggcttgaccacaccccacccagcaggagggcatccccgggcacacccctgagccccggctccctccgctccgctgcccatagccccctggacaccagcaagcagcccctctgccagctctgggccgagaagcatggcgcccgggggacccatgaggtgcggtacgtctcggccgggcagagcgtggcgtgcggctggtgggccttcgcaccgccgtgcctgcaggtcctcaacacgcccaagggcatcctgttcttcctgtgtgcggccgcattcctgcaggggatgactgtgaatggcttcatcaacacagtcatcacctccctggagcgccgctatgacctgcacagctaccagagcgggctcatcgccagctcctacgacattgccgcctgcctctgcctcaccttcgtcagctacttcgggggctcagggcacaagccgcgctggctgggctggggcgtgctgcttatgggcacggggtcgctggtgttcgcgctgccccacttcacggctggccgctatgaggtggagttggacgcgggtgtcaggacgtgccctgccaaccccggcgcggtgtgtgcggacagcacctcgggcctgtcccgctaccagctggtcttcatgctgggccagttcctgcatggcgtgggtgccacacccctctacacgctgggcgtcacctacctggatgagaacgtcaagtccagctgctcgcccgtctacattgccatcttctacacagcggccatcctgggcccagctgccggctacctgattggaggtgccctgctgaatatctacacggaaatgggccgacggacggagctgaccaccgagagcccactgtgggtcggcgcctggtgggtcggcttcctgggctctggggccgctgctttcttcaccgccgttcccatccttggttaccctcggcagctgccaggctcccagcgctacgcggtcatgagagcggcggaaatgcaccagttgaaggacagcagccgtggggaggcgagcaacccggactttgggaaaaccatcagagacctgcctctctccatctggctcctgctgaagaaccccacgttcatcctgctctgcctggccggggccaccgaggccactctcatcaccggcatgtccacgttcagccccaagttcttggagtcccagttcagcctgagtgcctcagaagctgccaccttgtttgcctcctgcccgaaggccacctgaacctaacggctccctgcaacgctgcctgcagctgccagccagaacactacagccctgtgtgcggctcggacggcctcatgtacttctcactgtgccacgcagggtgccctgcagccacggagacgaatgtggacggccagaagatgtgtccgtgaccctcagagatcctttgccctgggaatccagtggattgtagttagaatactagggggcatcccggggcccatcgccttcggctgggtgatcgacaaggcctgtctgctgtggcaggaccagtgtggccagcagggctcctgcttggtgtaccagaattcggccatgagccgctacatactcatcatggggctcctgtacaaggtgctgggcgtcctcttctttgccatagcctgcttcttatacaagcccctgtcggagtcttcagatggcctggaaacttgtctgcccagccagtcctcagcccctgacagtgccacagatagccagctccagagcagcgtctgaccaccgcccgcgcccacccggccacggcgggcactcagcatttcctgatgacagaacagtgccgttgggtgatgcaatcacacgggaacttctatttgacctgcaaccttctacttaacctgtggtttaaagtcggctgtgacctcctgtccccagagctgtacggccctgcagtgggtgggaggaacttgcataaatatatatttatggacacacagtttgcatcagaacgtgtttatagaatgtgttttatacccgatcgtgtgtggtgtgcgtgaggacaaactccgcaggggctgtgaatcccactgggagggcggcgggcctgcagcccgaggaaggcttgtgtgtcctcagttaaaactgtgcatatcgaaatatattttgttatttaagcctgcgtccccgt

SEQ ID NO: 1021 - DNA, 2587 bp, Homo sapiens
ctccctctgcggcgggggcggccccagcggatgaatgaagcggcgcgtggctgccggggaggccagagcgtggagcgctgcgcggcgcggcggccgggccctcgagacggggacggacacaccagcccctcggataccacttggccactcccgctgaggccactcccactgcgtggctgaagcctcgaggtcaccaggcggaggcgcggagatgcccctgcatcagctgggggacaagccgctcaccttccccagccccaactcagccatggaaaacgggcttgaccacaccccacccagcaggagggcatccccgggcacacccctgagccccggctccctccgctccgctgcccatagccccctggacaccagcaagcagcccctctgccagctctgggccgagaagcatggcgcccgggggacccatgaggtgcggtacgtctcggccgggcagagcgtggcgtgcggctggtgggccttcgcaccgccgtgcctgcaggtcctcaacacgcccaagggcatcctgttcttcctgtgtgcggccgcattcctgcaggggatgactgtgaatggcttcatcaacacagtcatcacctccctggagcgccgctatgacctgcacagctaccagagcgggctcatcgccagctcctacgacattgccgcctgcctctgcctcaccttcgtcagctacttcgggggctcagggcacaagccgcgctggctgggctggggcgtgctgcttatgggcacggggtcgctggtgttcgcgctgccccacttcacggctggccgctatgaggtggagttggacgcgggtgtcaggacgtgccctgccaaccccggcgcggtgtgtgcggacagcacctcgggcctgtcccgctaccagctggtcttcatgctgggccagttcctgcatggcgtgggtgccacacccctctacacgctgggcgtcacctacctggatgagaacgtcaagtccagctgctcgcccgtctacattgccatcttctacacagcggccatcctgggcccagctgccggctacctgattggaggtgccctgctgaatatctacacggaaatgggccgacggacggagctgaccaccgagagcccactgtgggtcggcgcctggtgggtcggcttcctgggctctggggccgctgctttcttcaccgccgttcccatccttggttaccctcggcagctgccaggctcccagcgctacgcggtcatgagagcggcggaaatgcaccagttgaaggacagcagccgtggggaggcgagcaacccggactttgggaaaaccatcagagacctgcctctctccatctggctcctgctgaagaaccccacgttcatcctgctctgcctggccggggccaccgaggccactctcatcaccggcatgtccacgttcagccccaagttcttggagtcccagttcagcctgagtgcctcagaagctgccaccttgtttgggtacctggtggtgccagcgggtggtggcggcaccttcctgggcggcttctttgtgaacaagctcaggctccggggctccgcggtcatcaagttctgcctgttctgcaccgttgtcagcctgctgggcatcctcgtcttctcactgcactgccccagtgtgcccatggcgggcgtcacagccagctacggcgggagcctcctgcccgaaggccacctgaacctaacggctccctgcaacgctgcctgcagctgccagccagaacactacagccctgtgtgcggctcggacggcctcatgtacttctcactgtgccacgcagggtgccctgcagccacggagacgaatgtggacggccagaaggtgtaccgagactgtagctgtatccctcagaatctttcctctggttttggccatgccactgcagggaaatgcacttcaacttgtcagagaaagcccctccttctggttttcatattcgttgtaattttctttacattcctcagcagcattcctgcactaacggcaactctacgatgtgtccgtgaccctcagagatcctttgccctgggaatccagtggattgtagttagaatactagggggcatcccggggcccatcgccttcggctgggtgatcgacaaggcctgtctgctgtggcaggaccagtgtggccagcagggctcctgcttggtgtaccagaattcggccatgagccgctacatactcatcatggggctcctgtacaaggaagaagagaatgaatttagaaggctgtaaaccccatctgagccttacacatagatctccttgaattggattttcaccaaggccgtgatggatgtggagtctcggctttctgacaacgtcttccagagcaggctttctctagagggtggactgcctgtgttctcctgggagagaatgcatttgcttccgatgcccagggcacgaaagaggtggacgaaacaacggaagtggagggggtggattctctacctgggaaacccagcatggcacactcatatagaattaagatcttataataagtgtgcagatgcgcccgttctaaggaaataaagggttctgccctcctaagaa

SEQ ID NO: 1022 - DNA, 2444 bp, Homo sapiens
ctccctctgcggcgggggcggccccagcggatgaatgaagcggcgcgtggctgccggggaggccagagcgtggagcgctgcgcggcgcggcggccgggccctcgagacggggacggacacaccagcccctcggataccacttggccactcccgctgaggccactcccactgcgtggctgaagcctcgaggtcaccaggcggaggcgcggagatgcccctgcatcagctgggggacaagccgctcaccttccccagccccaactcagccatggaaaacgggcttgaccacaccccacccagcaggagggcatccccgggcacacccctgagccccggctccctccgctccgctgcccatagccccctggacaccagcaagcagcccctctgccagctctgggccgagaagcatggcgcccgggggacccatgaggtgcggtacgtctcggccgggcagagcgtggcgtgcggctggtgggccttcgcaccgccgtgcctgcaggtcctcaacacgcccaagggcatcctgttcttcctgtgtgcggccgcattcctgcaggggatgactgtgaatggcttcatcaacacagtcatcacctccctggagcgccgctatgacctgcacagctaccagagcgggctcatcgccagctcctacgacattgccgcctgcctctgcctcaccttcgtcagctacttcgggggctcagggcacaagccgcgctggctgggctggggcgtgctgcttatgggcacggggtcgctggtgttcgcgctgccccacttcacggctggccgctatgaggtggagttggacgcgggtgtcaggacgtgccctgccaaccccggcgcggtgtgtgcggacagcacctcgggcctgtcccgctaccagctggtcttcatgctgggccagttcctgcatggcgtgggtgccacacccctctacacgctgggcgtcacctacctggatgagaacgtcaagtccagctgctcgcccgtctacattgccatcttctacacagcggccatcctgggcccagctgccggctacctgattggaggtgccctgctgaatatctacacggaaatgggccgacggacggagctgaccaccgagagcccactgtgggtcggcgcctggtgggtcggcttcctgggctctggggccgctgctttcttcaccgccgttcccatccttggttaccctcggcagctgccaggctcccagcgctacgcggtcatgagagcggcggaaatgcaccagttgaaggacagcagccgtggggaggcgagcaacccggactttgggaaaaccatcagagacctgcctctctccatctggctcctgctgaagaaccccacgttcatcctgctctgcctggccggggccaccgaggccactctcatcaccggcatgtccacgttcagccccaagttcttggagtcccagttcagcctgagtgcctcagaagctgccaccttgtttgggtacctggtggtgccagcgggtggtggcggcaccttcctgggcggcttctttgtgaacaagctcaggctccggggctccgcggtcatcaagttctgcctgttctgcaccgttgtcagcctgctgggcatcctcgtcttctcactgcactgccccagtgtgcccatggcgggcgtcacagccagctacggcgggagcctcctgcccgaaggccacctgaacctaacggctccctgcaacgctgcctgcagctgccagccagaacactacagccctgtgtgcggctcggacggcctcatgtacttctcactgtgccacgcagggtgccctgcagccacggagacgaatgtggacggccagaagcagcattcctgcactaacggcaactctacgatgtgtccgtgaccctcagagatcctttgccctgggaatccagtggattgtagttagaatactagggggcatcccggggcccatcgccttcggctgggtgatcgacaaggcctgtctgctgtggcaggaccagtgtggccagcagggctcctgcttggtgtaccagaattcggccatgagccgctacatactcatcatggggctcctgtacaaggaagaagagaatgaatttagaaggctgtaaaccccatctgagccttacacatagatctccttgaattggattttcaccaaggccgtgatggatgtggagtctcggctttctgacaacgtcttccagagcaggctttctctagagggtggactgcctgtgttctcctgggagagaatgcatttgcttccgatgcccagggcacgaaagaggtggacgaaacaacggaagtggagggggtggattctctacctgggaaacccagcatggcacactcatatagaattaagatcttataataagtgtgcagatgcgcccgttctaaggaaataaagggttctgccctcctaagaa

SEQ ID NO: 1023 - DNA, 1381 bp, Homo sapiens
aaacaaatgaactagggaaaggggctgtgcatcaggcggacggtgctggggggcatgggtgtgccttccttgcgtgaggaggaaaaaccattctatcaccagaaggcagtgcccagtgtgagtgcccagcgtgctgggggcggtgcaagcttggcaagtttgtagacccgaaatgcaggctgcatggggacgagccccatggctgaccctgtgcctgctgggcgccagcatggctctggcctggaccctaccactcgcttgtcccccctctgcagcctcctgcccgaaggccacctgaacctaacggctccctgcaacgctgcctgcagctgccagccagaacactacagccctgtgtgcggctcggacggcctcatgtacttctcactgtgccacgcagggtgccctgcagccacggagacgaatgtggacggccagaaggtgtaccgagactgtagctgtatccctcagaatctttcctctggttttggccatgccactgcagggaaatgcacttcaacttgtcagagaaagcccctccttctggttttcatattcgttgtaattttctttacattcctcagcagcattcctgcactaacggcaactctacgatgtgtccgtgaccctcagagatcctttgccctgggaatccagtggattgtagttagaatactagggggcatcccggggcccatcgccttcggctgggtgatcgacaaggcctgtctgctgtggcaggaccagtgtggccagcagggctcctgcttggtgtaccagaattcggccatgagccgctacatactcatcatggggctcctgtacaaggtgctgggcgtcctcttctttgccatagcctgcttcttatacaagcccctgtcggagtcttcagatggcctggaaacttgtctgcccagccagtcctcagcccctgacagtgccacagatagccagctccagagcagcgtctgaccaccgcccgcgcccacccggccacggcgggcactcagcatttcctgatgacagaacagtgccgttgggtgatgcaatcacacgggaacttctatttgacctgcaaccttctacttaacctgtggtttaaagtcggctgtgacctcctgtccccagagctgtacggccctgcagtgggtgggaggaacttgcataaatatatatttatggacacacagtttgcatcagaacgtgtttatagaatgtgttttatacccgatcgtgtgtggtgtgcgtgaggacaaactccgcaggggctgtgaatcccactgggagggcggcgggcctgcagcccgaggaaggcttgtgtgtcctcagttaaaactgtgcatatcgaaatatattttgttatttaagcctgcgtccccgt

SEQ ID NO: 1024 - DNA, 1221 bp, Homo sapiens
ctccctctgcggcgggggcggccccagcggatgaatgaagcggcgcgtggctgccggggaggccagagcgtggagcgctgcgcggcgcggcggccgggccctcgagacggggacgcctcctgcccgaaggccacctgaacctaacggctccctgcaacgctgcctgcagctgccagccagaacactacagccctgtgtgcggctcggacggcctcatgtacttctcactgtgccacgcagggtgccctgcagccacggagacgaatgtggacggccagaaggtgtaccgagactgtagctgtatccctcagaatctttcctctggttttggccatgccactgcagggaaatgcacttcaacttgtcagagaaagcccctccttctggttttcatattcgttgtaattttctttacattcctcagcagcattcctgcactaacggcaactctacgatgtgtccgtgaccctcagagatcctttgccctgggaatccagtggattgtagttagaatactagggggcatcccggggcccatcgccttcggctgggtgatcgacaaggcctgtctgctgtggcaggaccagtgtggccagcagggctcctgcttggtgtaccagaattcggccatgagccgctacatactcatcatggggctcctgtacaaggtgctgggcgtcctcttctttgccatagcctgcttcttatacaagcccctgtcggagtcttcagatggcctggaaacttgtctgcccagccagtcctcagcccctgacagtgccacagatagccagctccagagcagcgtctgaccaccgcccgcgcccacccggccacggcgggcactcagcatttcctgatgacagaacagtgccgttgggtgatgcaatcacacgggaacttctatttgacctgcaaccttctacttaacctgtggtttaaagtcggctgtgacctcctgtccccagagctgtacggccctgcagtgggtgggaggaacttgcataaatatatatttatggacacacagtttgcatcagaacgtgtttatagaatgtgttttatacccgatcgtgtgtggtgtgcgtgaggacaaactccgcaggggctgtgaatcccactgggagggcggcgggcctgcagcccgaggaaggcttgtgtgtcctcagttaaaactgtgcatatcgaaatatattttgttatttaagcctgcgtccccgt

SEQ ID NO: 1025 - DNA, 1179 bp, Homo sapiens
ggagttggacaatgggcgcagtgtgctctgattcaagtgagaagtgcagatgtttgtgactgccgaggggcgtcctcctgcccgaaggccacctgaacctaacggctccctgcaacgctgcctgcagctgccagccagaacactacagccctgtgtgcggctcggacggcctcatgtacttctcactgtgccacgcagggtgccctgcagccacggagacgaatgtggacggccagaaggtgtaccgagactgtagctgtatccctcagaatctttcctctggttttggccatgccactgcagggaaatgcacttcaacttgtcagagaaagcccctccttctggttttcatattcgttgtaattttctttacattcctcagcagcattcctgcactaacggcaactctacgatgtgtccgtgaccctcagagatcctttgccctgggaatccagtggattgtagttagaatactagggggcatcccggggcccatcgccttcggctgggtgatcgacaaggcctgtctgctgtggcaggaccagtgtggccagcagggctcctgcttggtgtaccagaattcggccatgagccgctacatactcatcatggggctcctgtacaaggtgctgggcgtcctcttctttgccatagcctgcttcttatacaagcccctgtcggagtcttcagatggcctggaaacttgtctgcccagccagtcctcagcccctgacagtgccacagatagccagctccagagcagcgtctgaccaccgcccgcgcccacccggccacggcgggcactcagcatttcctgatgacagaacagtgccgttgggtgatgcaatcacacgggaacttctatttgacctgcaaccttctacttaacctgtggtttaaagtcggctgtgacctcctgtccccagagctgtacggccctgcagtgggtgggaggaacttgcataaatatatatttatggacacacagtttgcatcagaacgtgtttatagaatgtgttttatacccgatcgtgtgtggtgtgcgtgaggacaaactccgcaggggctgtgaatcccactgggagggcggcgggcctgcagcccgaggaaggcttgtgtgtcctcagttaaaactgtgcatatcgaaatatattttgttatttaagcctgcgtccccgt

SEQ ID NO: 1026 - DNA, 3571 bp, Homo sapiens
aaacaaatgaactagggaaaggggctgtgcatcaggcggacggtgctggggggcatgggtgtgccttccttgcgtgaggaggaaaaaccattctatcaccagaaggcagtgcccagtgtgagtgcccagcgtgctgggggcggtgcaagcttggcaagtttgtagacccgaaatgcaggctgcatggggacgagccccatggctgaccctgtgcctgctgggcgccagcatggctctggcctggaccctaccactcgcttgtcccccctctgcagcctcctgcccgaaggccacctgaacctaacggctccctgcaacgctgcctgcagctgccagccagaacactacagccctgtgtgcggctcggacggcctcatgtacttctcactgtgccacgcagggtgccctgcagccacggagacgaatgtggacggccagaaggtgagtggagccgctgcctaccgcccctgtcctcccctggaccctgggaaggggcccccgtgccttccccttgtaatcggagctattgttgggcttcccaggtgtaccgagactgtagctgtatccctcagaatctttcctctggttttggccatgccactgcagggaaatgcacttcaacttgtcagagaaagcccctccttctggttttcatattcgttgtaattttctttacattcctcagcagcattcctgcactaacggcaactctacggtaagctggggtcgggtgtgcgcttgtccagagctttccttgcagcaccctgaggcggagctctgcagatcctgagacaggagcactccaggaaacacccaggtctaagcgggcctgtctgtcactggtggcaggagagacctcactgtctctgatctctgacgaggggcttcccacttgggggggggtgatgatgtggctggggactggtccaggaggccactggcctagggggtgacttggcatgcaaccccacttctgtgggtgctgacgctgtggttttctattgcagatgtgtccgtgaccctcagagatcctttgccctgggaatccagtggattgtagttagaatactagggggcatcccggggcccatcgccttcggctgggtgatcgacaaggcctgtctgctgtggcaggaccagtgtggccagcagggctcctgcttggtgtaccagaattcggccatgagccgctacatactcatcatggggctcctgtacaagtttcagttaccagaggtccaccacagtctgaatgtattaaataggaaattccagaagcaaacagttcataacctttaaagcacgcgccgttctgcacagtctggtgagatcttgatctgtcctgcccaggactcggattctccctttgtccaactttggaagaaggcaaggtcagaacttattctgcagggagctttggggatattggatactaaggcccaagccctctgtgatacgcctttcgctttggcataaaataacggttgactctctgttaggcgcgtctctgctcagggagtggtggtgtttggggaagcccaaaggcacatgagcatcaggaaattgaccatttgacttcataagacataacctttgtccagcgtgtccaggctattcatgccaccacctgttgatcacttagcagccggtgtggttcccacatcccccatcaccatatcacagtgccatgttcaagccactcttatttacctaatcatggccccaaagcaccggagcactcacgccgccgttcagctctgccaatgggaagccggaggcgcctccttcagcgagaaggtgtagttccttggctgggcttagtactacccttagactcacgcgtccacaggggtctcagtgtctgcggatgagggggctgctgtactttcccagggagccgtccccagactctctctttgctgtgttggatgcatcccttagctgggagcagcaggctgagagccctccacacgcagccatcccctgggctcagcacagccagcgggagccgtatccagagggtcagagttggcctcagcagcgcatgcgtccatgttaattgtagcgggggagcacacggtgtctccttataaacaccctcgcattccactttgtcctgcaccgagtcaaaacagcctcactccctgaatgcaggctcagggccatcagccaggctgacactccaggaggcacagtgggtgtttctggtccacgcccagcgtggaaatcatagtggtgcacatgtactctgcgtgggcattgcggcagcatccgtgcttggacctcaccgcctttggggcccacgtgggattcctgccacatcgtcctcttgccctgcaaagtcggtgcagcccctcattgttgacaaagaaaccaagaccctgaaggttcagaactgcccatgatggtggcaccggggcttgaaccccggctgtggtggtgaccggcgactggctctgtgtgaggttcctgtggccgccacgacaaaggaccgcaagcggggtggcctgatgtagcagaaccagattcgcttgcaggtgggggcagggcgggctccttccgccgctctggctctctgcagctgcatgtggcctttccctctgtccctgcctcaagtcttcctctcctttctctcatgaggacaccagtcattggatttggggcccaccttagatccaggatggtctcatctcaaatccttaattacatctgcaaagaccctatttccaaaaaaggtcccattcactggtgtctggcactgttcaacccatgacaagcccctcagtcctgtgcctctgtttttagtcaaagggtgtgtttcattccctctaacaatattggcgtctgctctacaaaccggttatatgggaaagataccctctcagagcaggatgggtttccgtggacctggtgagggtgctgcaggctggggcagggacaggactgggacaggcccaccagtatccaaaggctctggccgagctccccacgaggtccagcgggctcctctctccccaggtgctgggcgtcctcttctttgccatagcctgcttcttatacaagcccctgtcggagtcttcagatggcctggaaacttgtctgcccagccagtcctcagcccctgacagtgccacagatagccagctccagagcagcgtctgaccaccgcccgcgcccacccggccacggcgggcactcagcatttcctgatgacagaacagtgccgttgggtgatgcaatcacacgggaacttctatttgacctgcaaccttctacttaacctgtggtttaaagtcggctgtgacctcctgtccccagagctgtacggccctgcagtgggtgggaggaacttgcataaatatatatttatggacacacagtttgcatcagaacgtgtttatagaatgtgttttatacccgatcgtgtgtggtgtgcgtgaggacaaactccgcaggggctgtgaatcccactgggagggcggcgggcctgcagcccgaggaaggcttgtgtgtcctcagttaaaactgtgcatatcgaaatatattttgttatttaagcctgcgtccccgt

SEQ ID NO: 1027 - DNA, 1006 bp, Homo sapiens
ggagttggacaatgggcgcagtgtgctctgattcaagtgagaagtgcagatgtttgtgactgccgaggggcgtcctcctgcccgaaggccacctgaacctaacggctccctgcaacgctgcctgcagctgccagccagaacactacagccctgtgtgcggctcggacggcctcatgtacttctcactgtgccacgcagggtgccctgcagccacggagacgaatgtggacggccagaagatgtgtccgtgaccctcagagatcctttgccctgggaatccagtggattgtagttagaatactagggggcatcccggggcccatcgccttcggctgggtgatcgacaaggcctgtctgctgtggcaggaccagtgtggccagcagggctcctgcttggtgtaccagaattcggccatgagccgctacatactcatcatggggctcctgtacaaggtgctgggcgtcctcttctttgccatagcctgcttcttatacaagcccctgtcggagtcttcagatggcctggaaacttgtctgcccagccagtcctcagcccctgacagtgccacagatagccagctccagagcagcgtctgaccaccgcccgcgcccacccggccacggcgggcactcagcatttcctgatgacagaacagtgccgttgggtgatgcaatcacacgggaacttctatttgacctgcaaccttctacttaacctgtggtttaaagtcggctgtgacctcctgtccccagagctgtacggccctgcagtgggtgggaggaacttgcataaatatatatttatggacacacagtttgcatcagaacgtgtttatagaatgtgttttatacccgatcgtgtgtggtgtgcgtgaggacaaactccgcaggggctgtgaatcccactgggagggcggcgggcctgcagcccgaggaaggcttgtgtgtcctcagttaaaactgtgcatatcgaaatatattttgttatttaagcctgcgtccccgt

SEQ ID NO: 1028 - DNA, 569 bp, Homo sapiens
aaacaaatgaactagggaaaggggctgtgcatcaggcggacggtgctggggggcatgggtgtgccttccttgcgtgaggaggaaaaaccattctatcaccagaaggcagtgcccagtggtgccctgcagccacggagacgaatgtggacggccagaagcagcattcctgcactaacggcaactctacgatgtgtccgtgaccctcagagatcctttgccctgggaatccagtggattgtagttagaatactagggggcatcccggggcccatcgccttcggctgggtgatcgacaaggcctgtctgctgtggcaggaccagtgtggccagcagggctcctgcttggtgtaccagaattcggccatgagccgctacatactcatcatggggctcctgtacaaggctcccctgctgaggattcatcccaccttggatggaaaatgcagtttttgtgggagatggaactggagggtacggagggctgactgcacatacaaatatacatacatgagtgtacatatgttcttatataaacgtgtcacagtaaaattgttcctcatcttgcgtta

SEQ ID NO: 1029 - DNA, 177 bp, Artificial
  Synthetic oligonucleotide
gacacaccagcccctcggataccacttggccactcccgctgaggccactcccactgcgtggctgaagcctcgaggtcaccaggcggaggcgcggagatgcccctgcatcagctgggggacaagccgctcaccttccccagccccaactcagccatggaaaacgggcttgaccacacc

SEQ ID NO: 1030 - DNA, 646 bp, Artificial
  Synthetic oligonucleotide
ccacccagcaggagggcatccccgggcacacccctgagccccggctccctccgctccgctgcccatagccccctggacaccagcaagcagcccctctgccagctctgggccgagaagcatggcgcccgggggacccatgaggtgcggtacgtctcggccgggcagagcgtggcgtgcggctggtgggccttcgcaccgccgtgcctgcaggtcctcaacacgcccaagggcatcctgttcttcctgtgtgcggccgcattcctgcaggggatgactgtgaatggcttcatcaacacagtcatcacctccctggagcgccgctatgacctgcacagctaccagagcgggctcatcgccagctcctacgacattgccgcctgcctctgcctcaccttcgtcagctacttcgggggctcagggcacaagccgcgctggctgggctggggcgtgctgcttatgggcacggggtcgctggtgttcgcgctgccccacttcacggctggccgctatgaggtggagttggacgcgggtgtcaggacgtgccctgccaaccccggcgcggtgtgtgcggacagcacctcgggcctgtcccgctaccagctggtcttcatgctgggccagttcctgcatggcgtgggtgccacac

SEQ ID NO: 1031 - DNA, 122 bp, Artificial
  Synthetic oligonucleotide
gacggagctgaccaccgagagcccactgtgggtcggcgcctggtgggtcggcttcctgggctctggggccgctgctttcttcaccgccgttcccatccttggttaccctcggcagctgccag

SEQ ID NO: 1032 - DNA, 155 bp, Artificial
  Synthetic oligonucleotide
ctccatctggctcctgctgaagaaccccacgttcatcctgctctgcctggccggggccaccgaggccactctcatcaccggcatgtccacgttcagccccaagttcttggagtcccagttcagcctgagtgcctcagaagctgccaccttgtttg

SEQ ID NO: 1033 - DNA, 196 bp, Artificial
  Synthetic oligonucleotide
ggtacctggtggtgccagcgggtggtggcggcaccttcctgggcggcttctttgtgaacaagctcaggctccggggctccgcggtcatcaagttctgcctgttctgcaccgttgtcagcctgctgggcatcctcgtcttctcactgcactgccccagtgtgcccatggcgggcgtcacagccagctacggcgggag

SEQ ID NO: 1034 - DNA, 158 bp, Artificial
  Synthetic oligonucleotide
gtgagtgcccagcgtgctgggggcggtgcaagcttggcaagtttgtagacccgaaatgcaggctgcatggggacgagccccatggctgaccctgtgcctgctgggcgccagcatggctctggcctggaccctaccactcgcttgtcccccctctgcag

SEQ ID NO: 1035 - DNA, 125 bp, Artificial
  Synthetic oligonucleotide
cctcctgcccgaaggccacctgaacctaacggctccctgcaacgctgcctgcagctgccagccagaacactacagccctgtgtgcggctcggacggcctcatgtacttctcactgtgccacgcag

SEQ ID NO: 1036 - DNA, 143 bp, Artificial
  Synthetic oligonucleotide
gtgtaccgagactgtagctgtatccctcagaatctttcctctggttttggccatgccactgcagggaaatgcacttcaacttgtcagagaaagcccctccttctggttttcatattcgttgtaattttctttacattcctcag

SEQ ID NO: 1037 - DNA, 256 bp, Artificial
  Synthetic oligonucleotide
gtaagctggggtcgggtgtgcgcttgtccagagctttccttgcagcaccctgaggcggagctctgcagatcctgagacaggagcactccaggaaacacccaggtctaagcgggcctgtctgtcactggtggcaggagagacctcactgtctctgatctctgacgaggggcttcccacttgggggggggtgatgatgtggctggggactggtccaggaggccactggcctagggggtgacttggcatgcaaccccac

SEQ ID NO: 1038 - DNA, 149 bp, Artificial
  Synthetic oligonucleotide
ggggcatcccggggcccatcgccttcggctgggtgatcgacaaggcctgtctgctgtggcaggaccagtgtggccagcagggctcctgcttggtgtaccagaattcggccatgagccgctacatactcatcatggggctcctgtacaag

SEQ ID NO: 1039 - DNA, 140 bp, Artificial
  Synthetic oligonucleotide
acgataaagcacaaagccttctaaataaaatgcggtcccacggccagctgttcagaggatcttgacgctcttccttgggtgacggacccaggagagttcatcctgcaggaacccgtggcctcaggctttccaggagggag

SEQ ID NO: 1040 - DNA, 158 bp, Artificial
  Synthetic oligonucleotide
gttagagaaagggaaggagcccagctggttcacctcccctcggattagcagaaaagaggcgagtctgagcagggccttgtgtggctctggagagaagcagtgggttaaggagacatacacctcggtttccccctcatctgaggtttcactttccacag

SEQ ID NO: 1041 - DNA, 170 bp, Artificial
  Synthetic oligonucleotide
tttcagttaccagaggtccaccacagtctgaatgtattaaataggaaattccagaagcaaacagttcataacctttaaagcacgcgccgttctgcacagtctggtgagatcttgatctgtcctgcccaggactcggattctccctttgtccaactttggaagaaggcaag

SEQ ID NO: 1042 - DNA, 1567 bp, Artificial
  Synthetic oligonucleotide
gtcagaacttattctgcagggagctttggggatattggatactaaggcccaagccctctgtgatacgcctttcgctttggcataaaataacggttgactctctgttaggcgcgtctctgctcagggagtggtggtgtttggggaagcccaaaggcacatgagcatcaggaaattgaccatttgacttcataagacataacctttgtccagcgtgtccaggctattcatgccaccacctgttgatcacttagcagccggtgtggttcccacatcccccatcaccatatcacagtgccatgttcaagccactcttatttacctaatcatggccccaaagcaccggagcactcacgccgccgttcagctctgccaatgggaagccggaggcgcctccttcagcgagaaggtgtagttccttggctgggcttagtactacccttagactcacgcgtccacaggggtctcagtgtctgcggatgagggggctgctgtactttcccagggagccgtccccagactctctctttgctgtgttggatgcatcccttagctgggagcagcaggctgagagccctccacacgcagccatcccctgggctcagcacagccagcgggagccgtatccagagggtcagagttggcctcagcagcgcatgcgtccatgttaattgtagcgggggagcacacggtgtctccttataaacaccctcgcattccactttgtcctgcaccgagtcaaaacagcctcactccctgaatgcaggctcagggccatcagccaggctgacactccaggaggcacagtgggtgtttctggtccacgcccagcgtggaaatcatagtggtgcacatgtactctgcgtgggcattgcggcagcatccgtgcttggacctcaccgcctttggggcccacgtgggattcctgccacatcgtcctcttgccctgcaaagtcggtgcagcccctcattgttgacaaagaaaccaagaccctgaaggttcagaactgcccatgatggtggcaccggggcttgaaccccggctgtggtggtgaccggcgactggctctgtgtgaggttcctgtggccgccacgacaaaggaccgcaagcggggtggcctgatgtagcagaaccagattcgcttgcaggtgggggcagggcgggctccttccgccgctctggctctctgcagctgcatgtggcctttccctctgtccctgcctcaagtcttcctctcctttctctcatgaggacaccagtcattggatttggggcccaccttagatccaggatggtctcatctcaaatccttaattacatctgcaaagaccctatttccaaaaaaggtcccattcactggtgtctggcactgttcaacccatgacaagcccctcagtcctgtgcctctgtttttagtcaaagggtgtgtttcattccctctaacaatattggcgtctgctctacaaaccggttatatgggaaagataccctctcagagcaggatgggtttccgtggacctggtgagggtgctgcaggctggggcagggacaggactgggacaggcccac

SEQ ID NO: 1043 - DNA, 580 bp, Artificial
  Synthetic oligonucleotide
ctccagagcagcgtctgaccaccgcccgcgcccacccggccacggcgggcactcagcatttcctgatgacagaacagtgccgttgggtgatgcaatcacacgggaacttctatttgacctgcaaccttctacttaacctgtggtttaaagtcggctgtgacctcctgtccccagagctgtacggccctgcagtgggtgggaggaacttgcataaatatatatttatggacacacagtttgcatcagaacgtgtttatagaatgtgttttatacccgatcgtgtgtggtgtgcgtgaggacaaactccgcaggggctgtgaatcccactgggagggcggcgggcctgcagcccgaggaaggcttgtgtgtcctcagttaaaactgtgcatatcgaaatatattttgttatttaagcctgcgtccccgtaccgcgtgctttatttctatgagtttgcagagtttggtggtctcgccatccttggcccacgtcctgtagtcagccctgtggaatccgcggatatgaaaagttggccttccttatccacaggctcccccgtaagtcggccttccttatccacag

SEQ ID NO: 1044 - DNA, 167 bp, Artificial
  Synthetic oligonucleotide
gctcccctgctgaggattcatcccaccttggatggaaaatgcagtttttgtgggagatggaactggagggtacggagggctgactgcacatacaaatatacatacatgagtgtacatatgttcttatataaacgtgtcacagtaaaattgttcctcatcttgcgtta

SEQ ID NO: 1045 - DNA, 351 bp, Artificial
  Synthetic oligonucleotide
gaagaagagaatgaatttagaaggctgtaaaccccatctgagccttacacatagatctccttgaattggattttcaccaaggccgtgatggatgtggagtctcggctttctgacaacgtcttccagagcaggctttctctagagggtggactgcctgtgttctcctgggagagaatgcatttgcttccgatgcccagggcacgaaagaggtggacgaaacaacggaagtggagggggtggattctctacctgggaaacccagcatggcacactcatatagaattaagatcttataataagtgtgcagatgcgcccgttctaaggaaataaagggttctgccctcctaagaa

SEQ ID NO: 1046 - DNA, 115 bp, Artificial
  Synthetic oligonucleotide
ctccctctgcggcgggggcggccccagcggatgaatgaagcggcgcgtggctgccggggaggccagagcgtggagcgctgcgcggcgcggcggccgggccctcgagacggggacg

SEQ ID NO: 1047 - DNA, 69 bp, Artificial
  Synthetic oligonucleotide
ccctctacacgctgggcgtcacctacctggatgagaacgtcaagtccagctgctcgcccgtctacattg

SEQ ID NO: 1048 - DNA, 91 bp, Artificial
  Synthetic oligonucleotide
ccatcttctacacagcggccatcctgggcccagctgccggctacctgattggaggtgccctgctgaatatctacacggaaatgggccgacg

SEQ ID NO: 1049 - DNA, 112 bp, Artificial
  Synthetic oligonucleotide
gctcccagcgctacgcggtcatgagagcggcggaaatgcaccagttgaaggacagcagccgtggggaggcgagcaacccggactttgggaaaaccatcagagacctgcctct

SEQ ID NO: 1050 - DNA, 73 bp, Artificial
  Synthetic oligonucleotide
ggagttggacaatgggcgcagtgtgctctgattcaagtgagaagtgcagatgtttgtgactgccgaggggcgt

SEQ ID NO: 1051 - DNA, 117 bp, Artificial
  Synthetic oligonucleotide
aaacaaatgaactagggaaaggggctgtgcatcaggcggacggtgctggggggcatgggtgtgccttccttgcgtgaggaggaaaaaccattctatcaccagaaggcagtgcccagt

SEQ ID NO: 1052 - DNA, 41 bp, Artificial
  Synthetic oligonucleotide
ggtgccctgcagccacggagacgaatgtggacggccagaag

SEQ ID NO: 1053 - DNA, 101 bp, Artificial
  Synthetic oligonucleotide
gtgagtggagccgctgcctaccgcccctgtcctcccctggaccctgggaaggggcccccgtgccttccccttgtaatcggagctattgttgggcttcccag

SEQ ID NO: 1054 - DNA, 30 bp, Artificial
  Synthetic oligonucleotide
cagcattcctgcactaacggcaactctacg

SEQ ID NO: 1055 - DNA, 36 bp, Artificial
  Synthetic oligonucleotide
ttctgtgggtgctgacgctgtggttttctattgcag

SEQ ID NO: 1056 - DNA, 65 bp, Artificial
  Synthetic oligonucleotide
atgtgtccgtgaccctcagagatcctttgccctgggaatccagtggattgtagttagaatactag

SEQ ID NO: 1057 - DNA, 63 bp, Artificial
  Synthetic oligonucleotide
gtactgtgcagtgtgaggaagccatggtcagttgcacagtgtgctcactgcacaagggcatgg

SEQ ID NO: 1058 - DNA, 60 bp, Artificial
  Synthetic oligonucleotide
cagtatccaaaggctctggccgagctccccacgaggtccagcgggctcctctctccccag

SEQ ID NO: 1059 - DNA, 32 bp, Artificial
  Synthetic oligonucleotide
gtgctgggcgtcctcttctttgccatagcctg

SEQ ID NO: 1060 - DNA, 61 bp, Artificial
  Synthetic oligonucleotide
cttcttatacaagcccctgtcggagtcttcagatggcctggaaacttgtctgcccagccag

SEQ ID NO: 1061 - DNA, 33 bp, Artificial
  Synthetic oligonucleotide
tcctcagcccctgacagtgccacagatagccag

SEQ ID NO: 1062 - protein, 722 aa, Homo sapiens
MPLHQLGDKPLTFPSPNSAMENGLDHTPPSRRASPGTPLSPGSLRSAAHSPLDTSKQPLCQLWAEKHGARGTHEVRYVSAGQSVACGWWAFAPPCLQVLNTPKGILFFLCAAAFLQGMTVNGFINTVITSLERRYDLHSYQSGLIASSYDIAACLCLTFVSYFGGSGHKPRWLGWGVLLMGTGSLVFALPHFTAGRYEVELDAGVRTCPANPGAVCADSTSGLSRYQLVFMLGQFLHGVGATPLYTLGVTYLDENVKSSCSPVYIAIFYTAAILGPAAGYLIGGALLNIYTEMGRRTELTTESPLWVGAWWVGFLGSGAAAFFTAVPILGYPRQLPGSQRYAVMRAAEMHQLKDSSRGEASNPDFGKTIRDLPLSIWLLLKNPTFILLCLAGATEATLITGMSTFSPKFLESQFSLSASEAATLFGYLVVPAGGGGTFLGGFFVNKLRLRGSAVIKFCLFCTVVSLLGILVFSLHCPSVPMAGVTASYGGSLLPEGHLNLTAPCNAACSCQPEHYSPVCGSDGLMYFSLCHAGCPAATETNVDGQKVYRDCSCIPQNLSSGFGHATAGKCTSTCQRKPLLLVFIFVVIFFTFLSSIPALTATLRCVRDPQRSFALGIQWIVVRILGGIPGPIAFGWVIDKACLLWQDQCGQQGSCLVYQNSAMSRYILIMGLLYKVLGVLFFAIACFLYKPLSESSDGLETCLPSQSSAPDSATDSQLQSSV

SEQ ID NO: 1063 - protein, 722 aa, Homo sapiens; identical to SEQ ID NO: 1062

SEQ ID NO: 1064 - protein, 700 aa, Homo sapiens
MPLHQLGDKPLTFPSPNSAMENGLDHTPPSRRASPGTPLSPGSLRSAAHSPLDTSKQPLCQLWAEKHGARGTHEVRYVSAGQSVACGWWAFAPPCLQVLNTPKGILFFLCAAAFLQGMTVNGFINTVITSLERRYDLHSYQSGLIASSYDIAACLCLTFVSYFGGSGHKPRWLGWGVLLMGTGSLVFALPHFTAGRYEVELDAGVRTCPANPGAVCADSTSGLSRYQLVFMLGQFLHGVGATPLYTLGVTYLDENVKSSCSPVYIAIFYTAAILGPAAGYLIGGALLNIYTEMGRRTELTTESPLWVGAWWVGFLGSGAAAFFTAVPILGYPRQLPGSQRYAVMRAAEMHQLKDSSRGEASNPDFGKTIRDLPLSIWLLLKNPTFILLCLAGATEATLITGMSTFSPKFLESQFSLSASEAATLFGYLVVPAGGGGTFLGGFFVNKLRLRGSAVIKFCLFCTVVSLLGILVFSLHCPSVPMAGVTASYGGSLLPEGHLNLTAPCNAACSCQPEHYSPVCGSDGLMYFSLCHAGCPAATETNVDGQKVYRDCSCIPQNLSSGFGHATAGKCTSTCQRKPLLLVFIFVVIFFTFLSSIPALTATLRCVRDPQRSFALGIQWIVVRILGGIPGPIAFGWVIDKACLLWQDQCGQQGSCLVYQNSAMSRYILIMGLLYKFQLPEVHHSLNVLNRKFQKQTVHNL

SEQ ID NO: 1065 - protein, 682 aa, Homo sapiens
MPLHQLGDKPLTFPSPNSAMENGLDHTPPSRRASPGTPLSPGSLRSAAHSPLDTSKQPLCQLWAEKHGARGTHEVRYVSAGQSVACGWWAFAPPCLQVLNTPKGILFFLCAAAFLQGMTVNGFINTVITSLERRYDLHSYQSGLIASSYDIAACLCLTFVSYFGGSGHKPRWLGWGVLLMGTGSLVFALPHFTAGRYEVELDAGVRTCPANPGAVCADSTSGLSRYQLVFMLGQFLHGVGATPLYTLGVTYLDENVKSSCSPVYIAIFYTAAILGPAAGYLIGGALLNIYTEMGRRTELTTESPLWVGAWWVGFLGSGAAAFFTAVPILGYPRQLPGSQRYAVMRAAEMHQLKDSSRGEASNPDFGKTIRDLPLSIWLLLKNPTFILLCLAGATEATLITGMSTFSPKFLESQFSLSASEAATLFGYLVVPAGGGGTFLGGFFVNKLRLRGSAVIKFCLFCTVVSLLGILVFSLHCPSVPMAGVTASYGGSLLPEGHLNLTAPCNAACSCQPEHYSPVCGSDGLMYFSLCHAGCPAATETNVDGQKVYRDCSCIPQNLSSGFGHATAGKCTSTCQRKPLLLVFIFVVIFFTFLSSIPALTATLRCVRDPQRSFALGIQWIVVRILGGIPGPIAFGWVIDKACLLWQDQCGQQGSCLVYQNSAMSRYILIMGLLYKTIKHKAF

SEQ ID NO: 1066 - protein, 703 aa, Homo sapiens
MPLHQLGDKPLTFPSPNSAMENGLDHTPPSRRASPGTPLSPGSLRSAAHSPLDTSKQPLCQLWAEKHGARGTHEVRYVSAGQSVACGWWAFAPPCLQVLNTPKGILFFLCAAAFLQGMTVNGFINTVITSLERRYDLHSYQSGLIASSYDIAACLCLTFVSYFGGSGHKPRWLGWGVLLMGTGSLVFALPHFTAGRYEVELDAGVRTCPANPGAVCADSTSGLSRYQLVFMLGQFLHGVGATPLYTLGVTYLDENVKSSCSPVYIAIFYTAAILGPAAGYLIGGALLNIYTEMGRRTELTTESPLWVGAWWVGFLGSGAAAFFTAVPILGYPRQLPGSQRYAVMRAAEMHQLKDSSRGEASNPDFGKTIRDLPLSIWLLLKNPTFILLCLAGATEATLITGMSTFSPKFLESQFSLSASEAATLFGYLVVPAGGGGTFLGGFFVNKLRLRGSAVIKFCLFCTVVSLLGILVFSLHCPSVPMAGVTASYGGSLLPEGHLNLTAPCNAACSCQPEHYSPVCGSDGLMYFSLCHAGCPAATETNVDGQKVYRDCSCIPQNLSSGFGHATAGKCTSTCQRKPLLLVFIFVVIFFTFLSSIPALTATLRCVRDPQRSFALGIQWIVVRILGTVQCEEAMVSCTVCSLHKGMGGIPGPIAFGWVIDKACLLWQDQCGQQGSCLVYQNSAMSRYILIMGLLYKTIKHKAF

SEQ ID NO: 1067 - protein, 604 aa, Homo sapiens
MPLHQLGDKPLTFPSPNSAMENGLDHTPPSRRASPGTPLSPGSLRSAAHSPLDTSKQPLCQLWAEKHGARGTHEVRYVSAGQSVACGWWAFAPPCLQVLNTPKGILFFLCAAAFLQGMTVNGFINTVITSLERRYDLHSYQSGLIASSYDIAACLCLTFVSYFGGSGHKPRWLGWGVLLMGTGSLVFALPHFTAGRYEVELDAGVRTCPANPGAVCADSTSGLSRYQLVFMLGQFLHGVGATPLYTLGVTYLDENVKSSCSPVYIAIFYTAAILGPAAGYLIGGALLNIYTEMGRRTELTTESPLWVGAWWVGFLGSGAAAFFTAVPILGYPRQLPGSQRYAVMRAAEMHQLKDSSRGEASNPDFGKTIRDLPLSIWLLLKNPTFILLCLAGATEATLITGMSTFSPKFLESQFSLSASEAATLFGYLVVPAGGGGTFLGGFFVNKLRLRGSAVIKFCLFCTVVSLLGILVFSLHCPSVPMAGVTASYGGSLLPEGHLNLTAPCNAACSCQPEHYSPVCGSDGLMYFSLCHAGCPAATETNVDGQKVYRDCSCIPQNLSSGFGHATAGKCTSTCQRKPLLLVFIFVVIFFTFLSSIPALTATLR

SEQ ID NO: 1068 - protein, 620 aa, Homo sapiens
MPLHQLGDKPLTFPSPNSAMENGLDHTPPSRRASPGTPLSPGSLRSAAHSPLDTSKQPLCQLWAEKHGARGTHEVRYVSAGQSVACGWWAFAPPCLQVLNTPKGILFFLCAAAFLQGMTVNGFINTVITSLERRYDLHSYQSGLIASSYDIAACLCLTFVSYFGGSGHKPRWLGWGVLLMGTGSLVFALPHFTAGRYEVELDAGVRTCPANPGAVCADSTSGLSRYQLVFMLGQFLHGVGATPLYTLGVTYLDENVKSSCSPVYIAIFYTAAILGPAAGYLIGGALLNIYTEMGRRTELTTESPLWVGAWWVGFLGSGAAAFFTAVPILGYPRQLPGSQRYAVMRAAEMHQLKDSSRGEASNPDFGKTIRDLPLSIWLLLKNPTFILLCLAGATEATLITGMSTFSPKFLESQFSLSASEAATLFGYLVVPAGGGGTFLGGFFVNKLRLRGSAVIKFCLFCTVVSLLGILVFSLHCPSVPMAGVTASYGGSLLPEGHLNLTAPCNAACSCQPEHYSPVCGSDGLMYFSLCHAGCPAATETNVDGQKVSGAAAYRPCPPLDPGKGPPCLPLVIGAIVGLPRCTETVAVSLRIFPLVLAMPLQGNALQLVRESPSFWFSYSL

SEQ ID NO: 1069 - protein, 549 aa, Homo sapiens
MPLHQLGDKPLTFPSPNSAMENGLDHTPPSRRASPGTPLSPGSLRSAAHSPLDTSKQPLCQLWAEKHGARGTHEVRYVSAGQSVACGWWAFAPPCLQVLNTPKGILFFLCAAAFLQGMTVNGFINTVITSLERRYDLHSYQSGLIASSYDIAACLCLTFVSYFGGSGHKPRWLGWGVLLMGTGSLVFALPHFTAGRYEVELDAGVRTCPANPGAVCADSTSGLSRYQLVFMLGQFLHGVGATPLYTLGVTYLDENVKSSCSPVYIAIFYTAAILGPAAGYLIGGALLNIYTEMGRRTELTTESPLWVGAWWVGFLGSGAAAFFTAVPILGYPRQLPGSQRYAVMRAAEMHQLKDSSRGEASNPDFGKTIRDLPLSIWLLLKNPTFILLCLAGATEATLITGMSTFSPKFLESQFSLSASEAATLFGYLVVPAGGGGTFLGGFFVNKLRLRGSAVIKFCLFCTVVSLLGILVFSLHCPSVPMAGVTASYGGSLLPEGHLNLTAPCNAACSCQPEHYSPVCGSDGLMYFSLCHAGCPAATETNVDGQKMCP

SEQ ID NO: 1070 - protein, 559 aa, Homo sapiens
MPLHQLGDKPLTFPSPNSAMENGLDHTPPSRRASPGTPLSPGSLRSAAHSPLDTSKQPLCQLWAEKHGARGTHEVRYVSAGQSVACGWWAFAPPCLQVLNTPKGILFFLCAAAFLQGMTVNGFINTVITSLERRYDLHSYQSGLIASSYDIAACLCLTFVSYFGGSGHKPRWLGWGVLLMGTGSLVFALPHFTAGRYEVELDAGVRTCPANPGAVCADSTSGLSRYQLVFMLGQFLHGVGATPLYTLGVTYLDENVKSSCSPVYIAIFYTAAILGPAAGYLIGGALLNIYTEMGRRTELTTESPLWVGAWWVGFLGSGAAAFFTAVPILGYPRQLPGSQRYAVMRAAEMHQLKDSSRGEASNPDFGKTIRDLPLSIWLLLKNPTFILLCLAGATEATLITGMSTFSPKFLESQFSLSASEAATLFGYLVVPAGGGGTFLGGFFVNKLRLRGSAVIKFCLFCTVVSLLGILVFSLHCPSVPMAGVTASYGGSLLPEGHLNLTAPCNAACSCQPEHYSPVCGSDGLMYFSLCHAGCPAATETNVDGQKQHSCTNGNSTMCP

SEQ ID NO: 1071 - protein, 400 aa, Homo sapiens
MASSTQSSPPWSAAMTCTATRAGSSPAPTTLPPASASPSSATSGAQGTSRAGWAGACCLWARGRWCSRCPTSRLAAMRWSWTRVSGRALPTPARCVRTAPRACPATSWSSCWASSCMAWVPHPSTRWASPTWMRTSSPAARPSTLDGADHREPTVGRRLVGRLPGLWGRCFLHRRSHPWLPSAAARLPALRGHESGGNAPVEGQQPWGGEQPGLWENHQRPASLHLAPAEEPHVHPALPGRGHRGHSHHRHVHVQPQVLGVPVQPECLRSCHLVWVPGGASGWWRHLPGRLLCEQAQAPGLRGHQVLPVLHRCQPAGHPRLLTALPQCAHGGRHSQLRREPPARRPPEPNGSLQRCLQLPARTLQPCVRLGRPHVLLTVPRRVPCSHGDECGRPEGVPRL

SEQ ID NO: 1072 - protein, 743 aa, Homo sapiens
MPLHQLGDKPLTFPSPNSAMENGLDHTPPSRRASPGTPLSPGSLRSAAHSPLDTSKQPLCQLWAEKHGARGTHEVRYVSAGQSVACGWWAFAPPCLQVLNTPKGILFFLCAAAFLQGMTVNGFINTVITSLERRYDLHSYQSGLIASSYDIAACLCLTFVSYFGGSGHKPRWLGWGVLLMGTGSLVFALPHFTAGRYEVELDAGVRTCPANPGAVCADSTSGLSRYQLVFMLGQFLHGVGATPLYTLGVTYLDENVKSSCSPVYIAIFYTAAILGPAAGYLIGGALLNIYTEMGRRTELTTESPLWVGAWWVGFLGSGAAAFFTAVPILGYPRQLPGSQRYAVMRAAEMHQLKDSSRGEASNPDFGKTIRDLPLSIWLLLKNPTFILLCLAGATEATLITGMSTFSPKFLESQFSLSASEAATLFGYLVVPAGGGGTFLGGFFVNKLRLRGSAVIKFCLFCTVVSLLGILVFSLHCPSVPMAGVTASYGGSLLPEGHLNLTAPCNAACSCQPEHYSPVCGSDGLMYFSLCHAGCPAATETNVDGQKVYRDCSCIPQNLSSGFGHATAGKCTSTCQRKPLLLVFIFVVIFFTFLSSIPALTATLRCVRDPQRSFALGIQWIVVRILGTVQCEEAMVSCTVCSLHKGMGGIPGPIAFGWVIDKACLLWQDQCGQQGSCLVYQNSAMSRYILIMGLLYKVLGVLFFAIACFLYKPLSESSDGLETCLPSQSSAPDSATDSQLQSSV

SEQ ID NO: 1073 - protein, 432 aa, Homo sapiens
MPLHQLGDKPLTFPSPNSAMENGLDHTPPSRRASPGTPLSPGSLRSAAHSPLDTSKQPLCQLWAEKHGARGTHEVRYVSAGQSVACGWWAFAPPCLQVLNTPKGILFFLCAAAFLQGMTVNGFINTVITSLERRYDLHSYQSGLIASSYDIAACLCLTFVSYFGGSGHKPRWLGWGVLLMGTGSLVFALPHFTAGRYEVELDAGVRTCPANPGAVCADSTSGLSRYQLVFMLGQFLHGVGATPLYTLGVTYLDENVKSSCSPVYIAIFYTAAILGPAAGYLIGGALLNIYTEMGRRTELTTESPLWVGAWWVGFLGSGAAAFFTAVPILGYPRQLPGSQRYAVMRAAEMHQLKDSSRGEASNPDFGKTIRDLPLSIWLLLKNPTFILLCLAGATEATLITGMSTFSPKFLESQFSLSASEAATLFASCPKAT

SEQ ID NO: 1074 - protein, 684 aa, Homo sapiens
MPLHQLGDKPLTFPSPNSAMENGLDHTPPSRRASPGTPLSPGSLRSAAHSPLDTSKQPLCQLWAEKHGARGTHEVRYVSAGQSVACGWWAFAPPCLQVLNTPKGILFFLCAAAFLQGMTVNGFINTVITSLERRYDLHSYQSGLIASSYDIAACLCLTFVSYFGGSGHKPRWLGWGVLLMGTGSLVFALPHFTAGRYEVELDAGVRTCPANPGAVCADSTSGLSRYQLVFMLGQFLHGVGATPLYTLGVTYLDENVKSSCSPVYIAIFYTAAILGPAAGYLIGGALLNIYTEMGRRTELTTESPLWVGAWWVGFLGSGAAAFFTAVPILGYPRQLPGSQRYAVMRAAEMHQLKDSSRGEASNPDFGKTIRDLPLSIWLLLKNPTFILLCLAGATEATLITGMSTFSPKFLESQFSLSASEAATLFGYLVVPAGGGGTFLGGFFVNKLRLRGSAVIKFCLFCTVVSLLGILVFSLHCPSVPMAGVTASYGGSLLPEGHLNLTAPCNAACSCQPEHYSPVCGSDGLMYFSLCHAGCPAATETNVDGQKVYRDCSCIPQNLSSGFGHATAGKCTSTCQRKPLLLVFIFVVIFFTFLSSIPALTATLRCVRDPQRSFALGIQWIVVRILGGIPGPIAFGWVIDKACLLWQDQCGQQGSCLVYQNSAMSRYILIMGLLYKEEENEFRRL

SEQ ID NO: 1075 - protein, 262 aa, Homo sapiens
MGTSPMADPVPAGRQHGSGLDPTTRLSPLCSLLPEGHLNLTAPCNAACSCQPEHYSPVCGSDGLMYFSLCHAGCPAATETNVDGQKVYRDCSCIPQNLSSGFGHATAGKCTSTCQRKPLLLVFIFVVIFFTFLSSIPALTATLRCVRDPQRSFALGIQWIVVRILGGIPGPIAFGWVIDKACLLWQDQCGQQGSCLVYQNSAMSRYILIMGLLYKVLGVLFFAIACFLYKPLSESSDGLETCLPSQSSAPDSATDSQLQSSV

SEQ ID NO: 1076 - protein, 198 aa, Homo sapiens [sequence omitted]

SEQ ID NO: 1077 - protein, 160 aa, Homo sapiens [sequence omitted]

SEQ ID NO: 1078 - protein, 124 aa, Homo sapiens
MWTARRCVRDPQRSFALGIQWIVVRILGGIPGPIAFGWVIDKACLLWQDQCGQQGSCLVYQNSAMSRYILIMGLLYKVLGVLFFAIACFLYKPLSESSDGLETCLPSQSSAPDSATDSQLQSSV

SEQ ID NO: 1079 - protein, 171 aa, Homo sapiens
MGVPSLREEEKPFYHQKAVPSGALQPRRRMWTARSSIPALTATLRCVRDPQRSFALGIQWIVVRILGGIPGPIAFGWVIDKACLLWQDQCGQQGSCLVYQNSAMSRYILIMGLLYKAPLLRIHPTLDGKCSFCGRWNWRVRRADCTYKYTYMSVHMFLYKRVTVKLFLILR

SEQ ID NO: 1080 - protein, 661 aa, Homo sapiens
MPLHQLGDKPLTFPSPNSAMENGLDHTPPSRRASPGTPLSPGSLRSAAHSPLDTSKQPLCQLWAEKHGARGTHEVRYVSAGQSVACGWWAFAPPCLQVLNTPKGILFFLCAAAFLQGMTVNGFINTVITSLERRYDLHSYQSGLIASSYDIAACLCLTFVSYFGGSGHKPRWLGWGVLLMGTGSLVFALPHFTAGRYEVELDAGVRTCPANPGAVCADSTSGLSRYQLVFMLGQFLHGVGATPLYTLGVTYLDENVKSSCSPVYIAIFYTAAILGPAAGYLIGGALLNIYTEMGRRTELTTESPLWVGAWWVGFLGSGAAAFFTAVPILGYPRQLPGSQRYAVMRAAEMHQLKDSSRGEASNPDFGKTIRDLPLSIWLLLKNPTFILLCLAGATEATLITGMSTFSPKFLESQFSLSASEAATLFGYLVVPAGGGGTFLGGFFVNKLRLRGSAVIKFCLFCTVVSLLGILVFSLHCPSVPMAGVTASYGGSLLPEGHLNLTAPCNAACSCQPEHYSPVCGSDGLMYFSLCHAGCPAATETNVDGQKVSGAAAYRPCPPLDPGKGPPCLPLVIGAIVGLPRCTETVAVSLRIFPLVLAMHCREMHFNLSEKAPPSGFHIRCNFLYIPQQHSCTNGNSTVSWGRVCACPELSLQHPEAELCRS

SEQ ID NO: 1081 - DNA, 5376 bp, Homo sapiens
ggcggcggcggcggcgcgcggggactcggaggtactgggcgcgcgcggctccggctcgggacgcctcgggacgcctcggggtcgggctccggctgcggctgctgctgcggcgcccgcgctccggtgcgctccgcctcctgtgcccgccgcggagcgcagtctgcgcgcccgccgtgcgccctcagctccttttcctgagcccgccgcgatgggagctgcgcggggatccccggccagaccccgccggttgcctctgctcagcgtcctgctgctgccgctgctgggcggtacccagacagccattgtcttcatcaagcagccgtcctcccaggatgcactgcaggggcgccgggcgctgcttcgctgtgaggttgaggctccgggcccggtacatgtgtactggctgctcgatggggcccctgtccaggacacggagcggcgtttcgcccagggcagcagcctgagctttgcagctgtggaccggctgcaggactctggcaccttccagtgtgtggctcgggatgatgtcactggagaagaagcccgcagtgccaacgcctccttcaacatcaaatggattgaggcaggtcctgtggtcctgaagcatccagcctcggaagctgagatccagccacagacccaggtcacacttcgttgccacattgatgggcaccctcggcccacctaccaatggttccgagatgggacccccctttctgatggtcagagcaaccacacagtcagcagcaaggagcggaacctgacgctccggccagctggtcctgagcatagtgggctgtattcctgctgcgcccacagtgcttttggccaggcttgcagcagccagaacttcaccttgagcattgctgatgaaagctttgccagggtggtgctggcaccccaggacgtggtagtagcgaggtatgaggaggccatgttccattgccagttctcagcccagccacccccgagcctgcagtggctctttgaggatgagactcccatcactaaccgcagtcgccccccacacctccgcagagccacagtgtttgccaacgggtctctgctgctgacccaggtccggccacgcaatgcagggatctaccgctgcattggccaggggcagaggggcccacccatcatcctggaagccacacttcacctagcagagattgaagacatgccgctatttgagccacgggtgtttacagctggcagcgaggagcgtgtgacctgccttccccccaagggtctgccagagcccagcgtgtggtgggagcacgcgggagtccggctgcccacccatggcagggtctaccagaagggccacgagctggtgttggccaatattgctgaaagtgatgctggtgtctacacctgccacgcggccaacctggctggtcagcggagacaggatgtcaacatcactgtggccactgtgccctcctggctgaagaagccccaagacagccagctggaggagggcaaacccggctacttggattgcctgacccaggccacaccaaaacctacagttgtctggtacagaaaccagatgctcatctcagaggactcacggttcgaggtcttcaagaatgggaccttgcgcatcaacagcgtggaggtgtatgatgggacatggtaccgttgtatgagcagcaccccagccggcagcatcgaggcgcaagcccgtgtccaagtgctggaaaagctcaagttcacaccaccaccccagccacagcagtgcatggagtttgacaaggaggccacggtgccctgttcagccacaggccgagagaagcccactattaagtgggaacgggcagatgggagcagcctcccagagtgggtgacagacaacgctgggaccctgcattttgcccgggtgactcgagatgacgctggcaactacacttgcattgcctccaacgggccgcagggccagattcgtgcccatgtccagctcactgtggcagtttttatcaccttcaaagtggaaccagagcgtacgactgtgtaccagggccacacagccctactgcagtgcgaggcccagggggaccccaagccgctgattcagtggaaaggcaaggaccgcatcctggaccccaccaagctgggacccaggatgcacatcttccagaatggctccctggtgatccatgacgtggcccctgaggactcaggccgctacacctgcattgcaggcaacagctgcaacatcaagcacacggaggcccccctctatgtcgtgggtatgggctggggagggttatgctgcacaggaagtggtgggcccagacgtttgtcaccttgtactcagcccctgtgtacagaacatggcacagaagccatttttgtggcagcggtggggattcggccgtctcaccatgctgctgcacagtcttagagtccttgctcagagccgggctgtcgtttatttaacatccaacggtcggtgtgtgtgtgtgtgtgttgtgggggagtgggggggtgttctcttcctacaatgctgcctcccaggttcctgcagcagccacacatatctctgggtggctggggaggaggaccaggtcagaatgcagtaggacaaggttcttttctccaggaggcccagagaggatgatgggtcaggtaaaaggccctgcacttaactctctgcccctgggagacttatttctcctctggggacttgtttctgcatccacaggtgaaagtggtttaaatgagaagctcttaaactttcttggtttggcagcagagttatttttctagacaaagtataatgtgaaagtttaaatggatgaaaatgaactgaggaggcccccttggtgggagccactggggtgtgtgtggcagttgggggatcctgcatggtctcccttcattcccctaatgcctcttgaggcccctcagtgtgggccattaaaaggcccctagaccagcagatcccttctacagatctgcttattgaaaaacctgctctgtgccaggcagtgcctggaattctaaacctgaagctcccaaatgctgctctccggggcctggctcacattatcaagtcacttgggaagcttaacaaataacgtgggtttgtggtagctccttgacaggtgtgcttatccgtgtcgcctgtcttggcttccgatgcaaagccagcttgggaacccctggcctcatctccttcagagtcttcgtttgaccttggtggggcatgaggacctgctggcccttgttaaagccagtgaaggtggtgaccctcccgggccatctgttaagttgccctgttgatggggttgggaggagttagtagagaagcagggcttcttttgcttagcagcccctgcccagacccatctgtgtgtctctcagacaagcctgtgccggaggagtcggagggccctggcagccctcccccctacaagatgatccagaccattgggttgtcggtgggtgccgctgtggcctacatcattgccgtgctgggcctcatgttctactgcaagaagcgctgcaaagccaagcggctgcagaagcagcccgagggcgaggagccagagatggaatgcctcaacggtgggcctttgcagaacgggcagccctcagcagagatccaagaagaagtggccttgaccagcttgggctccggccccgcggccaccaacaaacgccacagcacaagtgataagatgcacttcccacggtctagcctgcagcccatcaccacgctggggaagagtgagtttggggaggtgttcctggcaaaggctcagggcttggaggagggagtggcagagaccctggtacttgtgaagagcctgcagagcaaggatgagcagcagcagctggacttccggagggagttggagatgtttgggaagctgaaccacgccaacgtggtgcggctcctggggctgtgccgggaggctgagccccactacatggtgctggaatatgtggatctgggagacctcaagcagttcctgaggatttccaagagcaaggatgaaaaattgaagtcacagcccctcagcaccaagcagaaggtggccctatgcacccaggtagccctgggcatggagcacctgtccaacaaccgctttgtgcataaggacttggctgcgcgtaactgcctggtcagtgcccagagacaagtgaaggtgtctgccctgggcctcagcaaggatgtgtacaacagtgagtactaccacttccgccaggcctgggtgccgctgcgctggatgtcccccgaggccatcctggagggtgacttctctaccaagtctgatgtctgggccttcggtgtgctgatgtgggaagtgtttacacatggagagatgccccatggtgggcaggcagatgatgaagtactggcagatttgcaggctgggaaggctagacttcctcagcccgagggctgcccttccaaactctatcggctgatgcagcgctgctgggccctcagccccaaggaccggccctccttcagtgagattgccagcgccctgggagacagcaccgtggacagcaagccgtgaggagggagcccgctcaggatggcctgggcaggggaggacatctctagagggaagctcacagcatgatgggcaagatccctgtcctcctgggccctgaggcccctgccctagtgcaacaggcattgctgaggtctgagcagggcctggcctttcctcctcttcctcaccctcatcctttgggaggctgacttggacccaaactgggcgactagggctttgagctgggcagttttccctgccacctcttcctctatcagggacagtgtgggtgccacaggtaaccccaatttctggccttcaacttctccccttgaccgggtccaactctgccactcatctgccaactttgcctggggagggctaggcttgggatgagctgggtttgtggggagttccttaatattctcaagttctgggcacacagggttaatgagtctcttggcccactggtcccacttgggggtctagaccaggattatagaggacacagcaagtgagtcctccccactctgggcttgtgcacactgacccagacccacgtcttccccacccttctctcctttcctcatcctaagtgcctggcagatgaaggagttttcaggagcttttgacactatataaaccgccctttttgtatgcaccacgggcggcttttatatgtaattgcagcgtggggtgggtgggcatgggaggtaggggtgggccctggagatgaggagggtgggccatccttaccccacacttttattgttgtcgttttttgtttgttttgtttttttgtttttgtttttgtttttacactcgctgctctcaataaataagccttttttacaacctg

SEQ ID NO: 1082 - DNA, 5360 bp, Homo sapiens
ggcggcggcggcggcgcgcggggactcggaggtactgggcgcgcgcggctccggctcgggacgcctcgggacgcctcggggtcgggctccggctgcggctgctgctgcggcgcccgcgctccggtgcgctccgcctcctgtgcccgccgcggagcgcagtctgcgcgcccgccgtgcgccctcagctccttttcctgagcccgccgcgatgggagctgcgcggggatccccggccagaccccgccggttgcctctgctcagcgtcctgctgctgccgctgctgggcggtacccagacagccattgtcttcatcaagcagccgtcctcccaggatgcactgcaggggcgccgggcgctgcttcgctgtgaggttgaggctccgggcccggtacatgtgtactggctgctcgatggggcccctgtccaggacacggagcggcgtttcgcccagggcagcagcctgagctttgcagctgtggaccggctgcaggactctggcaccttccagtgtgtggctcgggatgatgtcactggagaagaagcccgcagtgccaacgcctccttcaacatcaaatggattgaggcaggtcctgtggtcctgaagcatccagcctcggaagctgagatccagccacagacccaggtcacacttcgttgccacattgatgggcaccctcggcccacctaccaatggttccgagatgggacccccctttctgatggtcagagcaaccacacagtcagcagcaaggagcggaacctgacgctccggccagctggtcctgagcatagtgggctgtattcctgctgcgcccacagtgcttttggccaggcttgcagcagccagaacttcaccttgagcattgctgatgaaagctttgccagggtggtgctggcaccccaggacgtggtagtagcgaggtatgaggaggccatgttccattgccagttctcagcccagccacccccgagcctgcagtggctctttgaggatgagactcccatcactaaccgcagtcgccccccacacctccgcagagccacagtgtttgccaacgggtctctgctgctgacccaggtccggccacgcaatgcagggatctaccgctgcattggccaggggcagaggggcccacccatcatcctggaagccacacttcacctagcagagattgaagacatgccgctatttgagccacgggtgtttacagctggcagcgaggagcgtgtgacctgccttccccccaagggtctgccagagcccagcgtgtggtgggagcacgcgggagtccggctgcccacccatggcagggtctaccagaagggccacgagctggtgttggccaatattgctgaaagtgatgctggtgtctacacctgccacgcggccaacctggctggtcagcggagacaggatgtcaacatcactgtggccactgtgccctcctggctgaagaagccccaagacagccagctggaggagggcaaacccggctacttggattgcctgacccaggccacaccaaaacctacagttgtctggtacagaaaccagatgctcatctcagaggactcacggttcgaggtcttcaagaatgggaccttgcgcatcaacagcgtggaggtgtatgatgggacatggtaccgttgtatgagcagcaccccagccggcagcatcgaggcgcaagcccgtgtccaagtgctggaaaagctcaagttcacaccaccaccccagccacagcagtgcatggagtttgacaaggaggccacggtgccctgttcagccacaggccgagagaagcccactattaagtgggaacgggcagatgggagcagcctcccagagtgggtgacagacaacgctgggaccctgcattttgcccgggtgactcgagatgacgctggcaactacacttgcattgcctccaacgggccgcagggccagattcgtgcccatgtccagctcactgtggcagtttttatcaccttcaaagtggaaccagagcgtacgactgtgtaccagggccacacagccctactgcagtgcgaggcccagggggaccccaagccgctgattcagtggaaaggcaaggaccgcatcctggaccccaccaagctgggacccagaatggctccctggtgatccatgacgtggcccctgaggactcaggccgctacacctgcattgcaggcaacagctgcaacatcaagcacacggaggcccccctctatgtcgtgggtatgggctggggagggttatgctgcacaggaagtggtgggcccagacgtttgtcaccttgtactcagcccctgtgtacagaacatggcacagaagccatttttgtggcagcggtggggattcggccgtctcaccatgctgctgcacagtcttagagtccttgctcagagccgggctgtcgtttatttaacatccaacggtcggtgtgtgtgtgtgtgtgttgtgggggagtgggggggtgttctcttcctacaatgctgcctcccaggttcctgcagcagccacacatatctctgggtggctggggaggaggaccaggtcagaatgcagtaggacaaggttcttttctccaggaggcccagagaggatgatgggtcaggtaaaaggccctgcacttaactctctgcccctgggagacttatttctcctctggggacttgtttctgcatccacaggtgaaagtggtttaaatgagaagctcttaaactttcttggtttggcagcagagttatttttctagacaaagtataatgtgaaagtttaaatggatgaaaatgaactgaggaggcccccttggtgggagccactggggtgtgtgtggcagttgggggatcctgcatggtctcccttcattcccctaatgcctcttgaggcccctcagtgtgggccattaaaaggcccctagaccagcagatcccttctacagatctgcttattgaaaaacctgctctgtgccaggcagtgcctggaattctaaacctgaagctcccaaatgctgctctccggggcctggctcacattatcaagtcacttgggaagcttaacaaataacgtgggtttgtggtagctccttgacaggtgtgcttatccgtgtcgcctgtcttggcttccgatgcaaagccagcttgggaacccctggcctcatctccttcagagtcttcgtttgaccttggtggggcatgaggacctgctggcccttgttaaagccagtgaaggtggtgaccctcccgggccatctgttaagttgccctgttgatggggttgggaggagttagtagagaagcagggcttcttttgcttagcagcccctgcccagacccatctgtgtgtctctcagacaagcctgtgccggaggagtcggagggccctggcagccctcccccctacaagatgatccagaccattgggttgtcggtgggtgccgctgtggcctacatcattgccgtgctgggcctcatgttctactgcaagaagcgctgcaaagccaagcggctgcagaagcagcccgagggcgaggagccagagatggaatgcctcaacggtgggcctttgcagaacgggcagccctcagcagagatccaagaagaagtggccttgaccagcttgggctccggccccgcggccaccaacaaacgccacagcacaagtgataagatgcacttcccacggtctagcctgcagcccatcaccacgctggggaagagtgagtttggggaggtgttcctggcaaaggctcagggcttggaggagggagtggcagagaccctggtacttgtgaagagcctgcagagcaaggatgagcagcagcagctggacttccggagggagttggagatgtttgggaagctgaaccacgccaacgtggtgcggctcctggggctgtgccgggaggctgagccccactacatggtgctggaatatgtggatctgggagacctcaagcagttcctgaggatttccaagagcaaggatgaaaaattgaagtcacagcccctcagcaccaagcagaaggtggccctatgcacccaggtagccctgggcatggagcacctgtccaacaaccgctttgtgcataaggacttggctgcgcgtaactgcctggtcagtgcccagagacaagtgaaggtgtctgccctgggcctcagcaaggatgtgtacaacagtgagtactaccacttccgccaggcctgggtgccgctgcgctggatgtcccccgaggccatcctggagggtgacttctctaccaagtctgatgtctgggccttcggtgtgctgatgtgggaagtgtttacacatggagagatgccccatggtgggcaggcagatgatgaagtactggcagatttgcaggctgggaaggctagacttcctcagcccgagggctgcccttccaaactctatcggctgatgcagcgctgctgggccctcagccccaaggaccggccctccttcagtgagattgccagcgccctgggagacagcaccgtggacagcaagccgtgaggagggagcccgctcaggatggcctgggcaggggaggacatctctagagggaagctcacagcatgatgggcaagatccctgtcctcctgggccctgaggcccctgccctagtgcaacaggcattgctgaggtctgagcagggcctggcctttcctcctcttcctcaccctcatcctttgggaggctgacttggacccaaactgggcgactagggctttgagctgggcagttttccctgccacctcttcctctatcagggacagtgtgggtgccacaggtaaccccaatttctggccttcaacttctccccttgaccgggtccaactctgccactcatctgccaactttgcctggggagggctaggcttgggatgagctgggtttgtggggagttccttaatattctcaagttctgggcacacagggttaatgagtctcttggcccactggtcccacttgggggtctagaccaggattatagaggacacagcaagtgagtcctccccactctgggcttgtgcacactgacccagacccacgtcttccccacccttctctcctttcctcatcctaagtgcctggcagatgaaggagttttcaggagcttttgacactatataaaccgccctttttgtatgcaccacgggcggcttttatatgtaattgcagcgtggggtgggtgggcatgggaggtaggggtgggccctggagatgaggagggtgggccatccttaccccacacttttattgttgtcgttttttgtttgttttgtttttttgtttttgtttttgtttttacactcgctgctctcaataaataagccttttttacaacctg

SEQ ID NO: 1083 - DNA, 4349 bp, Homo sapiens
ggcggcggcggcggcgcgcggggactcggaggtactgggcgcgcgcggctccggctcgggacgcctcgggacgcctcggggtcgggctccggctgcggctgctgctgcggcgcccgcgctccggtgcgctccgcctcctgtgcccgccgcggagcgcagtctgcgcgcccgccgtgcgccctcagctccttttcctgagcccgccgcgatgggagctgcgcggggatccccggccagaccccgccggttgcctctgctcagcgtcctgctgctgccgctgctgggcggtacccagacagccattgtcttcatcaagcagccgtcctcccaggatgcactgcaggggcgccgggcgctgcttcgctgtgaggttgaggctccgggcccggtacatgtgtactggctgctcgatggggcccctgtccaggacacggagcggcgtttcgcccagggcagcagcctgagctttgcagctgtggaccggctgcaggactctggcaccttccagtgtgtggctcgggatgatgtcactggagaagaagcccgcagtgccaacgcctccttcaacatcaaatggattgaggcaggtcctgtggtcctgaagcatccagcctcggaagctgagatccagccacagacccaggtcacacttcgttgccacattgatgggcaccctcggcccacctaccaatggttccgagatgggacccccctttctgatggtcagagcaaccacacagtcagcagcaaggagcggaacctgacgctccggccagctggtcctgagcatagtgggctgtattcctgctgcgcccacagtgcttttggccaggcttgcagcagccagaacttcaccttgagcattgctggtgagcctggggtgggggcggaagggatgaggtgagcacaggagggcctcaccacccaggctgcatgctcccccatctttccctctccagatgaaagctttgccagggtggtgctggcaccccaggacgtggtagtagcgaggtatgaggaggccatgttccattgccagttctcagcccagccacccccgagcctgcagtggctctttgaggatgagactcccatcactaaccgcagtcgccccccacacctccgcagagccacagtgtttgccaacgggtctctgctgctgacccaggtccggccacgcaatgcagggatctaccgctgcattggccaggggcagaggggcccacccatcatcctggaagccacacttcacctagcagagattgaagacatgccgctatttgagccacgggtgtttacagctggcagcgaggagcgtgtgacctgccttccccccaagggtctgccagagcccagcgtgtggtgggagcacgcgggagtccggctgcccacccatggcagggtctaccagaagggccacgagctggtgttggccaatattgctgaaagtgatgctggtgtctacacctgccacgcggccaacctggctggtcagcggagacaggatgtcaacatcactgtggccactgtgccctcctggctgaagaagccccaagacagccagctggaggagggcaaacccggctacttggattgcctgacccaggccacaccaaaacctacagttgtctggtacagaaaccagatgctcatctcagaggactcacggttcgaggtcttcaagaatgggaccttgcgcatcaacagcgtggaggtgtatgatgggacatggtaccgttgtatgagcagcaccccagccggcagcatcgaggcgcaagcccgtgtccaagtgctggaaaagctcaagttcacaccaccaccccagccacagcagtgcatggagtttgacaaggaggccacggtgccctgttcagccacaggccgagagaagcccactattaagtgggaacgggcagatgggagcagcctcccagagtgggtgacagacaacgctgggaccctgcattttgcccgggtgactcgagatgacgctggcaactacacttgcattgcctccaacgggccgcagggccagattcgtgcccatgtccagctcactgtggcagtttttatcaccttcaaagtggaaccagagcgtacgactgtgtaccagggccacacagccctactgcagtgcgaggcccagggggaccccaagccgctgattcagtggaaaggcaaggaccgcatcctggaccccaccaagctgggacccaggatgcacatcttccagaatggctccctggtgatccatgacgtggcccctgaggactcaggccgctacacctgcattgcaggcaacagctgcaacatcaagcacacggaggcccccctctatgtcgtggacaagcctgtgccggaggagtcggagggccctggcagccctcccccctacaagatgatccagaccattgggttgtcggtgggtgccgctgtggcctacatcattgccgtgctgggcctcatgttctactgcaagaagcgctgcaaagccaagcggctgcagaagcagcccgagggcgaggagccagagatggaatgcctcaacggtgggcctttgcagaacgggcagccctcagcagagatccaagaagaagtggccttgaccagcttgggctccggccccgcggccaccaacaaacgccacagcacaagtgataagatgcacttcccacggtctagcctgcagcccatcaccacgctggggaagagtgagtttggggaggtgttcctggcaaaggctcagggcttggaggagggagtggcagagaccctggtacttgtgaagagcctgcagagcaaggatgagcagcagcagctggacttccggagggagttggagatgtttgggaagctgaaccacgccaacgtggtgcggctcctggggctgtgccgggaggctgagccccactacatggtgctggaatatgtggatctgggagacctcaagcagttcctgaggatttccaagagcaaggatgaaaaattgaagtcacagcccctcagcaccaagcagaaggtggccctatgcacccaggtagccctgggcatggagcacctgtccaacaaccgctttgtgcataaggacttggctgcgcgtaactgcctggtcagtgcccagagacaagtgaaggtgtctgccctgggcctcagcaaggatgtgtacaacagtgagtactaccacttccgccaggcctgggtgccgctgcgctggatgtcccccgaggccatcctggagggtgacttctctaccaagtctgatgtctgggccttcggtgtgctgatgtgggaagtgtttacacatggagagatgccccatggtgggcaggcagatgatgaagtactggcagatttgcaggctgggaaggctagacttcctcagcccgagggctgcccttccaaactctatcggctgatgcagcgctgctgggccctcagccccaaggaccggccctccttcagtgagattgccagcgccctgggagacagcaccgtggacagcaagccgtgaggagggagcccgctcaggatggcctgggcaggggaggacatctctagagggaagctcacagcatgatgggcaagatccctgtcctcctgggccctgaggcccctgccctagtgcaacaggcattgctgaggtctgagcagggcctggcctttcctcctcttcctcaccctcatcctttgggaggctgacttggacccaaactgggcgactagggctttgagctgggcagttttccctgccacctcttcctctatcagggacagtgtgggtgccacaggtaaccccaatttctggccttcaacttctccccttgaccgggtccaactctgccactcatctgccaactttgcctggggagggctaggcttgggatgagctgggtttgtggggagttccttaatattctcaagttctgggcacacagggttaatgagtctcttggcccactggtcccacttgggggtctagaccaggattatagaggacacagcaagtgagtcctccccactctgggcttgtgcacactgacccagacccacgtcttccccacccttctctcctttcctcatcctaagtgcctggcagatgaaggagttttcaggagcttttgacactatataaaccgccctttttgtatgcaccacgggcggcttttatatgtaattgcagcgtggggtgggtgggcatgggaggtaggggtgggccctggagatgaggagggtgggccatccttaccccacacttttattgttgtcgttttttgtttgttttgtttttttgtttttgtttttgtttttacactcgctgctctcaataaataagccttttttacaacctg

SEQ ID NO: 1084 - DNA, 4063 bp, Homo sapiens
ggcggcggcggcggcgcgcggggactcggaggtactgggcgcgcgcggctccggctcgggacgcctcgggacgcctcggggtcgggctccggctgcggctgctgctgcggcgcccgcgctccggtgcgctccgcctcctgtgcccgccgcggagcgcagtctgcgcgcccgccgtgcgccctcagctccttttcctgagcccgccgcgatgggagctgcgcggggatccccggccagaccccgccggttgcctctgctcagcgtcctgctgctgccgctgctgggcggtacccagacagccattgtcttcatcaagcagccgtcctcccaggatgcactgcaggggcgccgggcgctgcttcgctgtgaggttgaggctccgggcccggtacatgtgtactggctgctcgatggggcccctgtccaggacacggagcggcgtttcgcccagggcagcagcctgagctttgcagctgtggaccggctgcaggactctggcaccttccagtgtgtggctcgggatgatgtcactggagaagaagcccgcagtgccaacgcctccttcaacatcaaatggattgaggcaggtcctgtggtcctgaagcatccagcctcggaagctgagatccagccacagacccaggtcacacttcgttgccacattgatgggcaccctcgatgaaagctttgccagggtggtgctggcaccccaggacgtggtagtagcgaggtatgaggaggccatgttccattgccagttctcagcccagccacccccgagcctgcagtggctctttgaggatgagactcccatcactaaccgcagtcgccccccacacctccgcagagccacagtgtttgccaacgggtctctgctgctgacccaggtccggccacgcaatgcagggatctaccgctgcattggccaggggcagaggggcccacccatcatcctggaagccacacttcacctagcagagattgaagacatgccgctatttgagccacgggtgtttacagctggcagcgaggagcgtgtgacctgccttccccccaagggtctgccagagcccagcgtgtggtgggagcacgcgggagtccggctgcccacccatggcagggtctaccagaagggccacgagctggtgttggccaatattgctgaaagtgatgctggtgtctacacctgccacgcggccaacctggctggtcagcggagacaggatgtcaacatcactgtggccactgtgccctcctggctgaagaagccccaagacagccagctggaggagggcaaacccggctacttggattgcctgacccaggccacaccaaaacctacagttgtctggtacagaaaccagatgctcatctcagaggactcacggttcgaggtcttcaagaatgggaccttgcgcatcaacagcgtggaggtgtatgatgggacatggtaccgttgtatgagcagcaccccagccggcagcatcgaggcgcaagcccgtgtccaagtgctggaaaagctcaagttcacaccaccaccccagccacagcagtgcatggagtttgacaaggaggccacggtgccctgttcagccacaggccgagagaagcccactattaagtgggaacgggcagatgggagcagcctcccagagtgggtgacagacaacgctgggaccctgcattttgcccgggtgactcgagatgacgctggcaactacacttgcattgcctccaacgggccgcagggccagattcgtgcccatgtccagctcactgtggcagtttttatcaccttcaaagtggaaccagagcgtacgactgtgtaccagggccacacagccctactgcagtgcgaggcccagggggaccccaagccgctgattcagtggaaaggcaaggaccgcatcctggaccccaccaagctgggacccaggatgcacatcttccagaatggctccctggtgatccatgacgtggcccctgaggactcaggccgctacacctgcattgcaggcaacagctgcaacatcaagcacacggaggcccccctctatgtcgtggcctgtgccggaggagtcggagggccctggcagccctcccccctacaagatgatccagaccattgggttgtcggtgggtgccgctgtggcctacatcattgccgtgctgggcctcatgttctactgcaagaagcgctgcaaagccaagcggctgcagaagcagcccgagggcgaggagccagagatggaatgcctcaacggtgggcctttgcagaacgggcagccctcagcagagatccaagaagaagtggccttgaccagcttgggctccggccccgcggccaccaacaaacgccacagcacaagtgataagatgcacttcccacggtctagcctgcagcccatcaccacgctggggaagagtgagtttggggaggtgttcctggcaaaggctcagggcttggaggagggagtggcagagaccctggtacttgtgaagagcctgcagagcaaggatgagcagcagcagctggacttccggagggagttggagatgtttgggaagctgaaccacgccaacgtggtgcggctcctggggctgtgccgggaggctgagccccactacatggtgctggaatatgtggatctgggagacctcaagcagttcctgaggatttccaagagcaaggatgaaaaattgaagtcacagcccctcagcaccaagcagaaggtggccctatgcacccaggtagccctgggcatggagcacctgtccaacaaccgctttgtgcataaggacttggctgcgcgtaactgcctggtcagtgcccagagacaagtgaaggtgtctgccctgggcctcagcaaggatgtgtacaacagtgagtactaccacttccgccaggcctgggtgccgctgcgctggatgtcccccgaggccatcctggagggtgacttctctaccaagtctgatgtctgggccttcggtgtgctgatgtgggaagtgtttacacatggagagatgccccatggtgggcaggcagatgatgaagtactggcagatttgcaggctgggaaggctagacttcctcagcccgagggctgcccttccaaactctatcggctgatgcagcgctgctgggccctcagccccaaggaccggccctccttcagtgagattgccagcgccctgggagacagcaccgtggacagcaagccgtgaggagggagcccgctcaggatggcctgggcaggggaggacatctctagagggaagctcacagcatgatgggcaagatccctgtcctcctgggccctgaggcccctgccctagtgcaacaggcattgctgaggtctgagcagggcctggcctttcctcctcttcctcaccctcatcctttgggaggctgacttggacccaaactgggcgactagggctttgagctgggcagttttccctgccacctcttcctctatcagggacagtgtgggtgccacaggtaaccccaatttctggccttcaacttctccccttgaccgggtccaactctgccactcatctgccaactttgcctggggagggctaggcttgggatgagctgggtttgtggggagttccttaatattctcaagttctgggcacacagggttaatgagtctcttggcccactggtcccacttgggggtctagaccaggattatagaggacacagcaagtgagtcctccccactctgggcttgtgcacactgacccagacccacgtcttccccacccttctctcctttcctcatcctaagtgcctggcagatgaaggagttttcaggagcttttgacactatataaaccgccctttttgtatgcaccacgggcggcttttatatgtaattgcagcgtggggtgggtgggcatgggaggtaggggtgggccctggagatgaggagggtgggccatccttaccccacacttttattgttgtcgttttttgtttgttttgtttttttgtttttgtttttgtttttacactcgctgctctcaataaataagccttttttacaacctg

SEQ ID NO: 1085 - DNA, 6206 bp, Homo sapiens
ggcggcggcggcggcgcgcggggactcggaggtactgggcgcgcgcggctccggctcgggacgcctcgggacgcctcggggtcgggctccggctgcggctgctgctgcggcgcccgcgctccggtgcgctccgcctcctgtgcccgccgcggagcgcagtctgcgcgcccgccgtgcgccctcagctccttttcctgagcccgccgcgatgggagctgcgcggggatccccggccagaccccgccggttgcctctgctcagcgtcctgctgctgccgctgctgggcggtacccagacagccattgtcttcatcaagcagccgtcctcccaggatgcactgcaggggcgccgggcgctgcttcgctgtgaggttgaggctccgggcccggtacatgtgtactggctgctcgatggggcccctgtccaggacacggagcggcgtttcgcccagggcagcagcctgagctttgcagctgtggaccggctgcaggactctggcaccttccagtgtgtggctcgggatgatgtcactggagaagaagcccgcagtgccaacgcctccttcaacatcaaatggattgaggcaggtcctgtggtcctgaagcatccagcctcggaagctgagatccagccacagacccaggtcacacttcgttgccacattgatgggcaccctcggcccacctaccaatggttccgagatgggacccccctttctgatggtcagagcaaccacacagtcagcagcaaggagcggaacctgacgctccggccagctggtcctgagcatagtgggctgtattcctgctgcgcccacagtgcttttggccaggcttgcagcagccagaacttcaccttgagcattgctgatgaaagctttgccagggtggtgctggcaccccaggacgtggtagtagcgaggtatgaggaggccatgttccattgccagttctcagcccagccacccccgagcctgcagtggctctttgaggatgagactcccatcactaaccgcagtcgccccccacacctccgcagagccacagtgtttgccaacgggtctctgctgctgacccaggtccggccacgcaatgcagggatctaccgctgcattggccaggggcagaggggcccacccatcatcctggaagccacacttcacctagcagagattgaagacatgccgctatttgagccacgggtgtttacagctggcagcgaggagcgtgtgacctgccttccccccaagggtctgccagagcccagcgtgtggtgggagcacgcgggagtccggctgcccacccatggcagggtctaccagaagggccacgagctggtgttggccaatattgctgaaagtgatgctggtgtctacacctgccacgcggccaacctggctggtcagcggagacaggatgtcaacatcactgtggccactgtgccctcctggctgaagaagccccaagacagccagctggaggagggcaaacccggctacttggattgcctgacccaggccacaccaaaacctacagttgtctggtacagaaaccagatgctcatctcagaggactcacggttcgaggtcttcaagaatgggaccttgcgcatcaacagcgtggaggtgtatgatgggacatggtaccgttgtatgagcagcaccccagccggcagcatcgaggcgcaagcccgtgtccaagtgctggaaaagctcaagttcacaccaccaccccagccacagcagtgcatggagtttgacaaggaggccacggtgccctgttcagccacaggccgagagaagcccactattaagtgggaacgggcagatgggagcagcctcccagagtgggtgacagacaacgctgggaccctgcattttgcccgggtgactcgagatgacgctggcaactacacttgcattgcctccaacgggccgcagggccagattcgtgcccatgtccagctcactgtggcagtttttatcaccttcaaagtggaaccagagcgtacgactgtgtaccagggccacacagccctactgcagtgcgaggcccagggggaccccaagccgctgattcagtggaaaggcaaggaccgcatcctggaccccaccaagctgggacccaggatgcacatcttccagaatggctccctggtgatccatgacgtggcccctgaggactcaggccgctacacctgcattgcaggcaacagctgcaacatcaagcacacggaggcccccctctatgtcgtgggtatgggctggggagggttatgctgcacaggaagtggtgggcccagacgtttgtcaccttgtactcagcccctgtgtacagaacatggcacagaagccatttttgtggcagcggtggggattcggccgtctcaccatgctgctgcacagtcttagagtccttgctcagagccgggctgtcgtttatttaacatccaacggtcggtgtgtgtgtgtgtgtgttgtgggggagtgggggggtgttctcttcctacaatgctgcctcccaggttcctgcagcagccacacatatctctgggtggctggggaggaggaccaggtcagaatgcagtaggacaaggttcttttctccaggaggcccagagaggatgatgggtcaggtaaaaggccctgcacttaactctctgcccctgggagacttatttctcctctggggacttgtttctgcatccacaggtgaaagtggtttaaatgagaagctcttaaactttcttggtttggcagcagagttatttttctagacaaagtataatgtgaaagtttaaatggatgaaaatgaactgaggaggcccccttggtgggagccactggggtgtgtgtggcagttgggggatcctgcatggtctcccttcattcccctaatgcctcttgaggcccctcagtgtgggccattaaaaggcccctagaccagcagatcccttctacagatctgcttattgaaaaacctgctctgtgccaggcagtgcctggaattctaaacctgaagctcccaaatgctgctctccggggcctggctcacattatcaagtcacttgggaagcttaacaaataacgtgggtttgtggtagctccttgacaggtgtgcttatccgtgtcgcctgtcttggcttccgatgcaaagccagcttgggaacccctggcctcatctccttcagagtcttcgtttgaccttggtggggcatgaggacctgctggcccttgttaaagccagtgaaggtggtgaccctcccgggccatctgttaagttgccctgttgatggggttgggaggagttagtagagaagcagggcttcttttgcttagcagcccctgcccagacccatctgtgtgtctctcagacaagcctgtgccggaggagtcggagggccctggcagccctcccccctacaagatgatccagaccattgggttgtcggtgggtgccgctgtggcctacatcattgccgtgctgggcctcatgttctactgcaagaagcgctgcaaagccaagcggctgcagaagcagcccgagggcgaggagccagagatggaatgcctcaacggtgaggggccctggacggggaggtggtgcccgtgtgcgggagctgagcgccctcccgcggccacggaggggagagcgccagcactctggaaaccgagcggctgttgctgggtcctggagctgggactgccccacccctagcgggaagcctggagttggattcccagggcctcgtcttctgagcaacctggcttgagacttcttcattggagccccttggaccagcttcctatgattccctgctgtttcctcctcccagcacaaaaccacagatatcattagtatatgtacacacgttgctgttgcatgtcttgtctccctctatgagtctaagagctcccccaggggcagtctttctgtttacttcccttctcctatccccacttcctggactgggagctccttgaggtcattgctgggtctctcctatcagctcaggtgttcaggagcagaggttgggtctccattattgtgattttccctttgtgcctgtttagggctttgcccaataggaggccccatgaaagcaaaaatccttatgtgtagctatggtattaaggaccagtgattcagattagatgtctgcagttggcttcatctcagaggtcataatcagctgcatcactaaggggtcataccctaggggatagccatacatcccccacccagccccagccccattatttcatcatttgggcttgccctttcatgtggagcactgtgattggacccaagttggcaagagtggaagaccaggggacagaacagaaatccccatggtggccagagtgtcaggtctcatcgtgacgctcttgtcctcctccttcccaggtgggcctttgcagaacgggcagccctcagcagagatccaagaagaagtggccttgaccagcttgggctccggccccgcggccaccaacaaacgccacagcacaagtgataagatgcacttcccacggtctagcctgcagcccatcaccacgctggggaagagtgagtttggggaggtgttcctggcaaaggctcagggcttggaggagggagtggcagagaccctggtacttgtgaagagcctgcagagcaaggatgagcagcagcagctggacttccggagggagttggagatgtttgggaagctgaaccacgccaacgtggtgcggctcctggggctgtgccgggaggctgagccccactacatggtgctggaatatgtggatctgggagacctcaagcagttcctgaggatttccaagagcaaggatgaaaaattgaagtcacagcccctcagcaccaagcagaaggtggccctatgcacccaggtagccctgggcatggagcacctgtccaacaaccgctttgtgcataaggacttggctgcgcgtaactgcctggtcagtgcccagagacaagtgaaggtgtctgccctgggcctcagcaaggatgtgtacaacagtgagtactaccacttccgccaggcctgggtgccgctgcgctggatgtcccccgaggccatcctggagggtgacttctctaccaagtctgatgtctgggccttcggtgtgctgatgtgggaagtgtttacacatggagagatgccccatggtgggcaggcagatgatgaagtactggcagatttgcaggctgggaaggctagacttcctcagcccgagggctgcccttccaaactctatcggctgatgcagcgctgctgggccctcagccccaaggaccggccctccttcagtgagattgccagcgccctgggagacagcaccgtggacagcaagccgtgaggagggagcccgctcaggatggcctgggcaggggaggacatctctagagggaagctcacagcatgatgggcaagatccctgtcctcctgggccctgaggcccctgccctagtgcaacaggcattgctgaggtctgagcagggcctggcctttcctcctcttcctcaccctcatcctttgggaggctgacttggacccaaactgggcgactagggctttgagctgggcagttttccctgccacctcttcctctatcagggacagtgtgggtgccacaggtaaccccaatttctggccttcaacttctccccttgaccgggtccaactctgccactcatctgccaactttgcctggggagggctaggcttgggatgagctgggtttgtggggagttccttaatattctcaagttctgggcacacagggttaatgagtctcttggcccactggtcccacttgggggtctagaccaggattatagaggacacagcaagtgagtcctccccactctgggcttgtgcacactgacccagacccacgtcttccccacccttctctcctttcctcatcctaagtgcctggcagatgaaggagttttcaggagcttttgacactatataaaccgccctttttgtatgcaccacgggcggcttttatatgtaattgcagcgtggggtgggtgggcatgggaggtaggggtgggccctggagatgaggagggtgggccatccttaccccacacttttattgttgtcgttttttgtttgttttgtttttttgtttttgtttttgtttttacactcgctgctctcaataaataagccttttttacaacctg

SEQ ID NO: 1086 - DNA, 5973 bp, Homo sapiens
ggcggcggcggcggcgcgcggggactcggaggtactgggcgcgcgcggctccggctcgggacgcctcgggacgcctcggggtcgggctccggctgcggctgctgctgcggcgcccgcgctccggtgcgctccgcctcctgtgcccgccgcggagcgcagtctgcgcgcccgccgtgcgccctcagctccttttcctgagcccgccgcgatgggagctgcgcggggatccccggccagaccccgccggttgcctctgctcagcgtcctgctgctgccgctgctgggcggtacccagacagccattgtcttcatcaagcagccgtcctcccaggatgcactgcaggggcgccgggcgctgcttcgctgtgaggttgaggctccgggcccggtacatgtgtactggctgctcgatggggcccctgtccaggacacggagcggcgtttcgcccagggcagcagcctgagctttgcagctgtggaccggctgcaggactctggcaccttccagtgtgtggctcgggatgatgtcactggagaagaagcccgcagtgccaacgcctccttcaacatcaaatggattgaggcaggtcctgtggtcctgaagcatccagcctcggaagctgagatccagccacagacccaggtcacacttcgttgccacattgatgggcaccctcggcccacctaccaatggttccgagatgggacccccctttctgatggtcagagcaaccacacagtcagcagcaaggagcggaacctgacgctccggccagctggtcctgagcatagtgggctgtattcctgctgcgcccacagtgcttttggccaggcttgcagcagccagaacttcaccttgagcattgctgatgaaagctttgccagggtggtgctggcaccccaggacgtggtagtagcgaggtatgaggaggccatgttccattgccagttctcagcccagccacccccgagcctgcagtggctctttgaggatgagactcccatcactaaccgcagtcgccccccacacctccgcagagccacagtgtttgccaacgggtctctgctgctgacccaggtccggccacgcaatgcagggatctaccgctgcattggccaggggcagaggggcccacccatcatcctggaagccacacttcacctagcagagattgaagacatgccgctatttgagccacgggtgtttacagctggcagcgaggagcgtgtgacctgccttccccccaagggtctgccagagcccagcgtgtggtgggagcacgcgggagtccggctgcccacccatggcagggtctaccagaagggccacgagctggtgttggccaatattgctgaaagtgatgctggtgtctacacctgccacgcggccaacctggctggtcagcggagacaggatgtcaacatcactgtggccactgtgccctcctggctgaagaagccccaagacagccagctggaggagggcaaacccggctacttggattgcctgacccaggccacaccaaaacctacagttgtctggtacagaaaccagatgctcatctcagaggactcacggttcgaggtcttcaagaatgggaccttgcgcatcaacagcgtggaggtgtatgatgggacatggtaccgttgtatgagcagcaccccagccggcagcatcgaggcgcaagcccgtgtccaagtgctggaaaagctcaagttcacaccaccaccccagccacagcagtgcatggagtttgacaaggaggccacggtgccctgttcagccacaggccgagagaagcccactattaagtgggaacgggcagatgggagcagcctcccagagtgggtgacagacaacgctgggaccctgcattttgcccgggtgactcgagatgacgctggcaactacacttgcattgcctccaacgggccgcagggccagattcgtgcccatgtccagctcactgtggcagtttttatcaccttcaaagtggaaccagagcgtacgactgtgtaccagggccacacagccctactgcagtgcgaggcccagggggaccccaagccgctgattcagtggaaaggcaaggaccgcatcctggaccccaccaagctgggacccaggatgcacatcttccagaatggctccctggtgatccatgacgtggcccctgaggactcaggccgctacacctgcattgcaggcaacagctgcaacatcaagcacacggaggcccccctctatgtcgtgggtatgggctggggagggttatgctgcacaggaagtggtgggcccagacgtttgtcaccttgtactcagcccctgtgtacagaacatggcacagaagccatttttgtggcagcggtggggattcggccgtctcaccatgctgctgcacagtcttagagtccttgctcagagccgggctgtcgtttatttaacatccaacggtcggtgtgtgtgtgtgtgtgttgtgggggagtgggggggtgttctcttcctacaatgctgcctcccaggttcctgcagcagccacacatatctctgggtggctggggaggaggaccaggtcagaatgcagtaggacaaggttcttttctccaggaggcccagagaggatgatgggtcaggtaaaaggccctgcacttaactctctgcccctgggagacttatttctcctctggggacttgtttctgcatccacaggtgaaagtggtttaaatgagaagctcttaaactttcttggtttggcagcagagttatttttctagacaaagtataatgtgaaagtttaaatggatgaaaatgaactgaggaggcccccttggtgggagccactggggtgtgtgtggcagttgggggatcctgcatggtctcccttcattcccctaatgcctcttgaggcccctcagtgtgggccattaaaaggcccctagaccagcagatcccttctacagatctgcttattgaaaaacctgctctgtgccaggcagtgcctggaattctaaacctgaagctcccaaatgctgctctccggggcctggctcacattatcaagtcacttgggaagcttaacaaataacgtgggtttgtggtagctccttgacaggtgtgcttatccgtgtcgcctgtcttggcttccgatgcaaagccagcttgggaacccctggcctcatctccttcagagtcttcgtttgaccttggtggggcatgaggacctgctggcccttgttaaagccagtgaaggtggtgaccctcccgggccatctgttaagttgccctgttgatggggttgggaggagttagtagagaagcagggcttcttttgcttagcagcccctgcccagacccatctgtgtgtctctcagacaagcctgtgccggaggagtcggagggccctggcagccctcccccctacaagatgatccagaccattgggttgtcggtgggtgccgctgtggcctacatcattgccgtgctgggcctcatgttctactgcaagaagcgctgcaaagccaagcggctgcagaagcagcccgagggcgaggagccagagatggaatgcctcaacggtgaggggccctggacggggaggtggtgcccgtgtgcgggagctgagcgccctcccgcggccacggaggggagagcgccagcactctggaaaccgagcggctgttgctgggtcctggagctgggactgccccacccctagcgggaagcctggagttggattcccagggcctcgtcttctgagcaacctggcttgagacttcttcattggagccccttggaccagcttcctatgattccctgctgtttcctcctcccagcacaaaaccacagatatcattagtatatgtacacacgttgctgttgcatgtcttgtctccctctatgagtctaagagctcccccaggggcagtctttctgtttacttcccttctcctatccccacttcctggactgggagctccttgaggtcattgctgggtctctcctatcagctcaggtgttcaggagcagaggttgggtctccattattgtgattttccctttgtgcctgtttagggctttgcccaataggaggccccatgaaagcaaaaatccttatgtgtagctatggtattaaggaccagtgattcagattagatgtctgcagttggcttcatctcagaggtcataatcagctgcatcactaaggggtcataccctaggggatagccatacatcccccacccagccccagccccattatttcatcatttgggcttgccctttcatgtggagcactgtgattggacccaagttggcaagagtggaagaccaggggacagaacagaaatccccatggtggccagagtgtcaggtctcatcgtgacgctcttgtcctcctccttcccaggtgggcctttgcagaacgggcagccctcagcagagatccaagaagaagtggccttgaccagcttgggctccggccccgcggccaccaacaaacgccacagcacaagtgataagatgcacttcccacggtctagcctgcagcccatcaccacgctggggagacctcaagcagttcctgaggatttccaagagcaaggatgaaaaattgaagtcacagcccctcagcaccaagcagaaggtggccctatgcacccaggtagccctgggcatggagcacctgtccaacaaccgctttgtgcataaggacttggctgcgcgtaactgcctggtcagtgcccagagacaagtgaaggtgtctgccctgggcctcagcaaggatgtgtacaacagtgagtactaccacttccgccaggcctgggtgccgctgcgctggatgtcccccgaggccatcctggagggtgacttctctaccaagtctgatgtctgggccttcggtgtgctgatgtgggaagtgtttacacatggagagatgccccatggtgggcaggcagatgatgaagtactggcagatttgcaggctgggaaggctagacttcctcagcccgagggctgcccttccaaactctatcggctgatgcagcgctgctgggccctcagccccaaggaccggccctccttcagtgagattgccagcgccctgggagacagcaccgtggacagcaagccgtgaggagggagcccgctcaggatggcctgggcaggggaggacatctctagagggaagctcacagcatgatgggcaagatccctgtcctcctgggccctgaggcccctgccctagtgcaacaggcattgctgaggtctgagcagggcctggcctttcctcctcttcctcaccctcatcctttgggaggctgacttggacccaaactgggcgactagggctttgagctgggcagttttccctgccacctcttcctctatcagggacagtgtgggtgccacaggtaaccccaatttctggccttcaacttctccccttgaccgggtccaactctgccactcatctgccaactttgcctggggagggctaggcttgggatgagctgggtttgtggggagttccttaatattctcaagttctgggcacacagggttaatgagtctcttggcccactggtcccacttgggggtctagaccaggattatagaggacacagcaagtgagtcctccccactctgggcttgtgcacactgacccagacccacgtcttccccacccttctctcctttcctcatcctaagtgcctggcagatgaaggagttttcaggagcttttgacactatataaaccgccctttttgtatgcaccacgggcggcttttatatgtaattgcagcgtggggtgggtgggcatgggaggtaggggtgggccctggagatgaggagggtgggccatccttaccccacacttttattgttgtcgttttttgtttgttttgtttttttgtttttgtttttgtttttacactcgctgctctcaataaataagccttttttacaacctg

SEQ ID NO: 1087 - DNA, 4811 bp, Homo sapiens
ggcggcggcggcggcgcgcggggactcggaggtactgggcgcgcgcggctccggctcgggacgcctcgggacgcctcggggtcgggctccggctgcggctgctgctgcggcgcccgcgctccggtgcgctccgcctcctgtgcccgccgcggagcgcagtctgcgcgcccgccgtgcgccctcagctccttttcctgagcccgccgcgatgggagctgcgcggggatccccggccagaccccgccggttgcctctgctcagcgtcctgctgctgccgctgctgggcggtacccagacagccattgtcttcatcaagcagccgtcctcccaggatgcactgcaggggcgccgggcgctgcttcgctgtgaggttgaggctccgggcccggtacatgtgtactggctgctcgatggggcccctgtccaggacacggagcggcgtttcgcccagggcagcagcctgagctttgcagctgtggaccggctgcaggactctggcaccttccagtgtgtggctcgggatgatgtcactggagaagaagcccgcagtgccaacgcctccttcaacatcaaatggattgaggcaggtcctgtggtcctgaagcatccagcctcggaagctgagatccagccacagacccaggtcacacttcgttgccacattgatgggcaccctcggcccacctaccaatggttccgagatgggacccccctttctgatggtcagagcaaccacacagtcagcagcaaggagcggaacctgacgctccggccagctggtcctgagcatagtgggctgtattcctgctgcgcccacagtgcttttggccaggcttgcagcagccagaacttcaccttgagcattgctgatgaaagctttgccagggtggtgctggcaccccaggacgtggtagtagcgaggtatgaggaggccatgttccattgccagttctcagcccagccacccccgagcctgcagtggctctttgaggatgagactcccatcactaaccgcagtcgccccccacacctccgcagagccacagtgtttgccaacgggtctctgctgctgacccaggtccggccacgcaatgcagggatctaccgctgcattggccaggggcagaggggcccacccatcatcctggaagccacacttcacctagcagagattgaagacatgccgctatttgagccacgggtgtttacagctggcagcgaggagcgtgtgacctgccttccccccaagggtctgccagagcccagcgtgtggtgggagcacgcgggagtccggctgcccacccatggcagggtctaccagaagggccacgagctggtgttggccaatattgctgaaagtgatgctggtgtctacacctgccacgcggccaacctggctggtcagcggagacaggatgtcaacatcactgtggccactgtgccctcctggctgaagaagccccaagacagccagctggaggagggcaaacccggctacttggattgcctgacccaggccacaccaaaacctacagttgtctggtacagaaaccagatgctcatctcagaggactcacggttcgaggtcttcaagaatgggaccttgcgcatcaacagcgtggaggtgtatgatgggacatggtaccgttgtatgagcagcaccccagccggcagcatcgaggcgcaagcccgtgtccaagtgctggaaaagctcaagttcacaccaccaccccagccacagcagtgcatggagtttgacaaggaggccacggtgccctgttcagccacaggccgagagaagcccactattaagtgggaacgggcagatgggagcagcctcccagagtgggtgacagacaacgctgggaccctgcattttgcccgggtgactcgagatgacgctggcaactacacttgcattgcctccaacgggccgcagggccagattcgtgcccatgtccagctcactgtggcagtttttatcaccttcaaagtggaaccagagcgtacgactgtgtaccagggccacacagccctactgcagtgcgaggcccagggggaccccaagccgctgattcagtggaaaggcaaggaccgcatcctggaccccaccaagctgggacccaggatgcacatcttccagaatggctccctggtgatccatgacgtggcccctgaggactcaggccgctacacctgcattgcaggcaacagctgcaacatcaagcacacggaggcccccctctatgtcgtgggtatgggctggggagggttatgctgcacaggaagtggtgggcccagacgtttgtcaccttgtactcagcccctgtgtacagaacatggcacagaagccatttttgtggcagcggtggggattcggccgtctcaccatgctgctgcacagtcttagagtccttgctcagagccgggctgtcgtttatttaacatccaacggtcggtgtgtgtgtgtgtgtgttgtgggggagtgggggggtgttctcttcctacaatgctgcctcccaggttcctgcagcagccacacatatctctgggtggctggggaggaggaccaggtcagaatgcagtaggacaaggttcttttctccaggaggcccagagaggatgatgggtcaggtaaaaggccctgcacttaactctctgcccctgggagacttatttctcctctggggacttgtttctgcatccacaggtgaaagtggtttaaatgagaagctcttaaactttcttggtttggcagcagagttatttttctagacaaagtataatgtgaaagtttaaatggatgaaaatgaactgaggaggcccccttggtgggagccactggggtgtgtgtggcagttgggggatcctgcatggtctcccttcattcccctaatgcctcttgaggcccctcagtgtgggccattaaaaggcccctagaccagcagatcccttctacagatctgcttattgaaaaacctgctctgtgccaggcagtgcctggaattctaaacctgaagctcccaaatgctgctctccggggcctggctcacattatcaagtcacttgggaagcttaacaaataacgtgggtttgtggtagctccttgacaggtgtgcttatccgtgtcgcctgtcttggcttccgatgcaaagccagcttgggaacccctggcctcatctccttcagagtcttcgtttgaccttggtggggcatgaggacctgctggcccttgttaaagccagtgaaggtggtgaccctcccgggccatctgttaagttgccctgttgatggggttgggaggagttagtagagaagcagggcttcttttgcttagcagcccctgcccagacccatctgtgtgtctctcagacaagcctgtgccggaggagtcggagggccctggcagccctcccccctacaagatgatccagaccattgggttgtcggtgggtgccgctgtggcctacatcattgccgtgctgggcctcatgttctactgcaagaagcgctgcaaagccaagcggctgcagaagcagcccgagggcgaggagccagagatggaatgcctcaacggtgaggggccctggacggggaggtggtgcccgtgtgcgggagctgagcgccctcccgcggccacggaggggagagcgccagcactctggaaaccgagcggctgttgctgggtcctggagctgggactgccccacccctagcgggaagcctggagttggattcccagggcctcgtcttctgagcaacctggcttgagacttcttcattggagccccttggaccagcttcctatgattccctgctgtttcctcctcccagcacaaaaccacagatatcattagtatatgtacacacgttgctgttgcatgtcttgtctccctctatgagtctaagagctcccccaggggcagtctttctgtttacttcccttctcctatccccacttcctggactgggagctccttgaggtcattgctgggtctctcctatcagctcaggtgttcaggagcagaggttgggtctccattattgtgattttccctttgtgcctgtttagggctttgcccaataggaggccccatgaaagcaaaaatccttatgtgtagctatggtattaaggaccagtgattcagattagatgtctgcagttggcttcatctcagaggtcataatcagctgcatcactaaggggtcataccctaggggatagccatacatcccccacccagccccagccccattatttcatcatttgggcttgccctttcatgtggagcactgtgattggacccaagttggcaagagtggaagaccaggggacagaacagaaatccccatggtggccagagtgtcaggtctcatcgtgacgctcttgtcctcctccttcccaggtgggcctttgcagaacgggcagccctcagcagagatccaagaagaagtggccttgaccagcttgggctccggccccgcggccaccaacaaacgccacagcacaagtgataagatgcacttcccacggtctagcctgcagcccatcaccacgctgggtatgttgccttgactacagctgcccctgcctaactacaagtcacccgctgtgtcttgaggctgggtacgggctagtgttctgaagtccctgaaacctagaatgttagaggtggagggaagcataggtagagatctagcccagtgtggccccagagcctgttattcactgcccttcgtgcagattttgtcattcctgtgtactacctgtagtattatttacttgatgttttatttaaattgactcttta

SEQ ID NO: 1088 - DNA, 2946 bp, Homo sapiens
ggcggcggcggcggcgcgcggggactcggaggtactgggcgcgcgcggctccggctcgggacgcctcgggacgcctcggggtcgggctccggctgcggctgctgctgcggcgcccgcgctccggtgcgctccgcctcctgtgcccgccgcggagcgcagtctgcgcgcccgccgtgcgccctcagctccttttcctgagcccgccgcgatgggagctgcgcggggatccccggccagaccccgccggttgcctctgctcagcgtcctgctgctgccgctgctgggcggtacccagacagccattgtcttcatcaagcagccgtcctcccaggatgcactgcaggggcgccgggcgctgcttcgctgtgaggttgaggctccgggcccggtacatgtgtactggctgctcgatggggcccctgtccaggacacggagcggcgtttcgcccagggcagcagcctgagctttgcagctgtggaccggctgcaggactctggcaccttccagtgtgtggctcgggatgatgtcactggagaagaagcccgcagtgccaacgcctccttcaacatcaaatggattgaggcaggtcctgtggtcctgaagcatccagcctcggaagctgagatccagccacagacccaggtcacacttcgttgccacattgatgggcaccctcggcccacctaccaatggttccgagatgggacccccctttctgatggtcagagcaaccacacagtcagcagcaaggagcggaacctgacgctccggccagctggtcctgagcatagtgggctgtattcctgctgcgcccacagtgcttttggccaggcttgcagcagccagaacttcaccttgagcattgctgatgaaagctttgccagggtggtgctggcaccccaggacgtggtagtagcgaggtatgaggaggccatgttccattgccagttctcagcccagccacccccgagcctgcagtggctctttgaggatgagactcccatcactaaccgcagtcgccccccacacctccgcagagccacagtgtttgccaacgggtctctgctgctgacccaggtccggccacgcaatgcagggatctaccgctgcattggccaggggcagaggggcccacccatcatcctggaagccacacttcacctagcagagattgaagacatgccgctatttgagccacgggtgtttacagctggcagcgaggagcgtgtgacctgccttccccccaagggtctgccagagcccagcgtgtggtgggagcacgcgggagtccggctgcccacccatggcagggtctaccagaagggccacgagctggtgttggccaatattgctgaaagtgatgctggtgtctacacctgccacgcggccaacctggctggtcagcggagacaggatgtcaacatcactgtggccactgtgccctcctggctgaagaagccccaagacagccagctggaggagggcaaacccggctacttggattgcctgacccaggccacaccaaaacctacagttgtctggtacagaaaccagatgctcatctcagaggactcacggttcgaggtcttcaagaatgggaccttgcgcatcaacagcgtggaggtgtatgatgggacatggtaccgttgtatgagcagcaccccagccggcagcatcgaggcgcaagcccgtgtccaagtgctggaaaagctcaagttcacaccaccaccccagccacagcagtgcatggagtttgacaaggaggccacggtgccctgttcagccacaggccgagagaagcccactattaagtgggaacgggcagatgggagcagcctcccagagtgggtgacagacaacgctgggaccctgcattttgcccgggtgactcgagatgacgctggcaactacacttgcattgcctccaacgggccgcagggccagattcgtgcccatgtccagctcactgtggcagtttttatcaccttcaaagtggaaccagagcgtacgactgtgtaccagggccacacagccctactgcagtgcgaggcccagggggaccccaagccgctgattcagtggaaaggcaaggaccgcatcctggaccccaccaagctgggacccaggatgcacatcttccagaatggctccctggtgatccatgacgtggcccctgaggactcaggccgctacacctgcattgcaggcaacagctgcaacatcaagcacacggaggcccccctctatgtcgtgggtatgggctggggagggttatgctgcacaggaagtggtgggcccagacgtttgtcaccttgtactcagcccctgtgtacagaacatggcacagaagccatttttgtggcagcggtggggattcggccgtctcaccatgctgctgcacagtcttagagtccttgctcagagccgggctgtcgtttatttaacatccaacggtcggtgtgtgtgtgtgtgtgttgtgggggagtgggggggtgttctcttcctacaatgctgcctcccaggttcctgcagcagccacacatatctctgggtggctggggaggaggaccaggtcagaatgcagtaggacaaggttcttttctccaggaggcccagagaggatgatgggtcaggtaaaaggccctgcacttaactctctgcccctgggagacttatttctcctctggggacttgtttctgcatccacaggtgaaagtggtttaaatgagaaggcggcccgcttggctggtggggcccgcggcgggattttcccgggcggcgagagcggatctatcttgggatcccatggctttctttactgggctctggggccccttcacctgtgtaagcagagtgctgagccatcactgtttcagcaccactgggagtctgagtgcgattcagaagatgacgcgggtacgagtggtggacaacagtgccctggg

SEQ ID NO: 1089 - DNA, 2469 bp, Homo sapiens
ggcggcggcggcggcgcgcggggactcggaggtactgggcgcgcgcggctccggctcgggacgcctcgggacgcctcggggtcgggctccggctgcggctgctgctgcggcgcccgcgctccggtgcgctccgcctcctgtgcccgccgcggagcgcagtctgcgcgcccgccgtgcgccctcagctccttttcctgagcccgccgcgatgggagctgcgcggggatccccggccagaccccgccggttgcctctgctcagcgtcctgctgctgccgctgctgggcggtacccagacagccattgtcttcatcaagcagccgtcctcccaggatgcactgcaggggcgccgggcgctgcttcgctgtgaggttgaggctccgggcccggtacatgtgtactggctgctcgatggggcccctgtccaggacacggagcggcgtttcgcccagggcagcagcctgagctttgcagctgtggaccggctgcaggactctggcaccttccagtgtgtggctcgggatgatgtcactggagaagaagcccgcagtgccaacgcctccttcaacatcaaatggattgaggcaggtcctgtggtcctgaagcatccagcctcggaagctgagatccagccacagacccaggtcacacttcgttgccacattgatgggcaccctcggcccacctaccaatggttccgagatgggacccccctttctgatggtcagagcaaccacacagtcagcagcaaggagcggaacctgacgctccggccagctggtcctgagcatagtgggctgtattcctgctgcgcccacagtgcttttggccaggcttgcagcagccagaacttcaccttgagcattgctgatgaaagctttgccagggtggtgctggcaccccaggacgtggtagtagcgaggtatgaggaggccatgttccattgccagttctcagcccagccacccccgagcctgcagtggctctttgaggatgagactcccatcactaaccgcagtcgccccccacacctccgcagagccacagtgtttgccaacgggtctctgctgctgacccaggtccggccacgcaatgcagggatctaccgctgcattggccaggggcagaggggcccacccatcatcctggaagccacacttcacctagcagagattgaagacatgccgctatttgagccacgggtgtttacagctggcagcgaggagcgtgtgacctgccttccccccaagggtctgccagagcccagcgtgtggtgggagcacgcgggagtccggctgcccacccatggcagggtctaccagaagggccacgagctggtgttggccaatattgctgaaagtgatgctggtgtctacacctgccacgcggccaacctggctggtcagcggagacaggatgtcaacatcactgtggccagtgagcacctttgccctgaaggtcaaggagaggtggaggggaacacaggtctgggtgtgatggacagaggcttccctggtactcacctgaggtcctctcagttctgggccctgcaggcttgggaatcagttcactactgggagtcggtgtagacagtagagagccaggcacaggggttagggtgggtgctccagaggaaatagtgacagccctcacagaaaaatggtcctctgggtacagaggaaagagcaatagactaggaatctagagacctgggtcccactatgctcccaatgcacagagtgacgatggtagcaaatcacccaccttactggggttcagtctcctcatccataaaatggagccagtaatctactacctaccccacaaggtggttggaaaggtcaaatgaagtagatgaaaatgatttttctttttttcttttttgggaggtaatagtggacaaaattataggtgatttttaatttgttttagtttgttatgctttccaaatttctttactaaacatattacttatgaaaaaaaagagggggagaaaagcaagacatatgactgaaagtacacatgataaaccctttatatcaggctgggcgcggtggctcatgcctgtaatcccagcactttgggaggccgagccgggcggatcacaaggtcaggagttggagaccagcctgaccaacatggtgaaaccccatctctactaaaaatacaaaaattagctgggcgtggtggggcacacctgtaatcccagctactcaggaggctgagggaggaaaattgcttgaacccaggaggcagaggttgcaatgagctgagatcgcaccgttgctcttcagcccgggcaacagagtgagactccatctcaaaacaaaacaaaacaaaccttatatcctcactacaggcatagggatttatttgtttacttatttctttataccatgccttgttccaaaccttttgtggtagtttaaaaggatacacaataaaaattacaatatgcacacagagacac

SEQ ID NO: 1090 - DNA, 2799 bp, Homo sapiens
ggcggcggcggcggcgcgcggggactcggaggtactgggcgcgcgcggctccggctcgggacgcctcgggacgcctcggggtcgggctccggctgcggctgctgctgcggcgcccgcgctccggtgcgctccgcctcctgtgcccgccgcggagcgcagtctgcgcgcccgccgtgcgccctcagctccttttcctgagcccgccgcgatgggagctgcgcggggatccccggccagaccccgccggttgcctctgctcagcgtcctgctgctgccgctgctgggcggtacccagacagccattgtcttcatcaagcagccgtcctcccaggatgcactgcaggggcgccgggcgctgcttcgctgtgaggttgaggctccgggcccggtacatgtgtactggctgctcgatggggcccctgtccaggacacggagcggcgtttcgcccagggcagcagcctgagctttgcagctgtggaccggctgcaggactctggcaccttccagtgtgtggctcgggatgatgtcactggagaagaagcccgcagtgccaacgcctccttcaacatcaaatggattgaggcaggtcctgtggtcctgaagcatccagcctcggaagctgagatccagccacagacccaggtcacacttcgttgccacattgatgggcaccctcggcccacctaccaatggttccgagatgggacccccctttctgatggtcagagcaaccacacagtcagcagcaaggagcggaacctgacgctccggccagctggtcctgagcatagtgggctgtattcctgctgcgcccacagtgcttttggccaggcttgcagcagccagaacttcaccttgagcattgctgatgaaagctttgccagggtggtgctggcaccccaggacgtggtagtagcgaggtatgaggaggccatgttccattgccagttctcagcccagccacccccgagcctgcagtggctctttgaggatgagactcccatcactaaccgcagtcgccccccacacctccgcagagccacagtgtttgccaacgggtctctgctgctgacccaggtccggccacgcaatgcagggatctaccgctgcattggccaggggcagaggggcccacccatcatcctggaagccacacttcacctagcagagattgaagacatgccgctatttgagccacgggtgtttacagctggcagcgaggagcgtgtgacctgccttccccccaagggtctgccagagcccagcgtgtggtgggagcacgcgggagtccggctgcccacccatggcagggtctaccagaagggccacgagctggtgttggccaatattgctgaaagtgatgctggtgtctacacctgccacgcggccaacctggctggtcagcggagacaggatgtcaacatcactgtggccagtgagcacctttgccctgaaggtcaaggagaggtggaggggaacacaggtctgggtgtgatggacagaggcttccctggtactcacctgaggtcctctcagttctgggccctgcaggcttgggaatcagttcactactgggagtcggtgtagacagtagagagccaggcacaggggttagggtgggtgctccagaggaaatagtgacagccctcacagaaaaatggtcctctgggtacagaggaaagagcaatagactaggaatctagagacctgggtcccactatgctcccaatgcacagagtgacgatggtagcaaatcacccaccttactggggttcagtctcctcatccataaaatggagccagtaatctactacctaccccacaaggtggttggaaaggtcaaatgaagtagatgaaaatgatttttctttttttcttttttgggaggtaatagtggacaaaattataggtgatttttaatttgttttagtttgttatgctttccaaatttctttactaaacatattacttatgaaaaaaaagagggggagaaaagcaagacatatgactgaaagtacacatgataaaccctttatatcaggctgggcgcggtggctcatgcctgtaatcccagcactttgggaggccgagccgggcggatcacaaggtcaggagttggagaccagcctgaccaacatggtgaaaccccatctctactaaaaatacaaaaattagctgggcgtggtggggcacacctgtaatcccagctactcaggaggctgagggaggaaaattgcttgaacccaggaggcagaggttgcaatgagctgagatcgcaccgttgctcttcagcccgggcaacagagtgagactccatctcaaaacaaaacaaaacaaaccttatatcctcactacaggcatagggatttatttgtttacttatttctttataccatgccttgttccaaaccttttgtggtagtttaaaaggatacacaataaaaattacaatatgcacacagagacacacatacatacaaactattttgcaatctgcttcttccacttacctttatgttactattatctttccgagtgggtaactttgcaaaaagatttgaatatgaaagtggctttgtaaatgtgaagttgtgatgctagtattcccattaggatactgaaatcttagaagacatgcacctatactcaggccgtgatttgggtgggaatcacagcacatgtgtaacgagtgctcaggacactcacagtgcaggtgcaaaggcaagatgcacagtcaagccttcctccagttgaggtctgagaatcacctgctttcattagggatactttttcttctt

SEQ ID NO: 1091 - DNA, 972 bp, Homo sapiens
ggcggcggcggcggcgcgcggggactcggaggtactgggcgcgcgcggctccggctcgggacgcctcgggacgcctcggggtcgggctccggctgcggctgctgctgcggcgcccgcgctccggtgcgctccgcctcctgtgcccgccgcggagcgcagtctgcgcgcccgccgtgcgccctcagctccttttcctgagcccgccgcgatgggagctgcgcggggatccccggccagaccccgccggttgcctctgctcagcgtcctgctgctgccgctgctgggcggtacccagacagccattgtcttcatcaagcagccgtcctcccaggatgcactgcaggggcgccgggcgctgcttcgctgtgaggttgaggctccgggcccggtacatgtgtactggctgctcgatggggcccctgtccaggacacggagcggcgtttcgcccagggcagcagcctgagctttgcagctgtggaccggctgcaggactctggcaccttccagtgtgtggctcgggatgatgtcactggagaagaagcccgcagtgccaacgcctccttcaacatcaaatgtgagagccaggggggctgtgcccagtccccctgtcagaccctcaatgactgaggcctgggggatccctcccttacctcagcttctcccatttccagttaaacgggccaggcagaatgcatttatcatcagctttttttgctcatgtggataagaggaaattaaaagttatattttttccaaaattttttccttcaagtctgggacccatttatctgctgcatgcttgtgcaaatggaaagggcggccgagcccttggccaagtgtcagacttgacctgccagggaccaggcaggcacttagtatctggtaactgtagccccagcctcagcctccagggcttccttgtgtctgttggcacagagcctcgaggttccacggcttcctgcttgtcctcc

SEQ ID NO: 1092 - DNA, 4229 bp, Homo sapiens
ggcggcggcggcggcgcgcggggactcggaggtactgggcgcgcgcggctccggctcgggacgcctcgggacgcctcggggtcgggctccggctgcggctgctgctgcggcgcccgcgctccggtgcgctccgcctcctgtgcccgccgcggagcgcagtctgcgcgcccgccgtgcgccctcagctccttttcctgagcccgccgcgatgggagctgcgcggggatccccggccagaccccgccggttgcctctgctcagcgtcctgctgctgccgctgctgggcggtacccagacagccattgtcttcatcaagcagccgtcctcccaggatgcactgcaggggcgccgggcgctgcttcgctgtgaggttgaggctccgggcccggtacatgtgtactggctgctcgatggggcccctgtccaggacacggagcggcgtttcgcccagggcagcagcctgagctttgcagctgtggaccggctgcaggactctggcaccttccagtgtgtggctcgggatgatgtcactggagaagaagcccgcagtgccaacgcctccttcaacatcaaatggattgaggcaggtcctgtggtcctgaagcatccagcctcggaagctgagatccagccacagacccaggtcacacttcgttgccacattgatgggcaccctcggcccacctaccaatggttccgagatgggacccccctttctgatggtcagagcaaccacacagtcagcagcaaggagcggaacctgacgctccggccagctggtcctgagcatagtgggctgtattcctgctgcgcccacagtgcttttggccaggcttgcagcagccagaacttcaccttgagcattgctggtgagcctggggtgggggcggaagggatgaggtgagcacaggagggcctcaccacccaggctgcatgctcccccatctttccctctccagatgaaagctttgccagggtggtgctggcaccccaggacgtggtagtagcgaggtatgaggaggccatgttccattgccagttctcagcccagccacccccgagcctgcagtggctctttgaggatgagactcccatcactaaccgcagtcgccccccacacctccgcagagccacagtgtttgccaacgggtctctgctgctgacccaggtccggccacgcaatgcagggatctaccgctgcattggccaggggcagaggggcccacccatcatcctggaagccacacttcacctagcagagattgaagacatgccgctatttgagccacgggtgtttacagctggcagcgaggagcgtgtgacctgccttccccccaagggtctgccagagcccagcgtgtggtgggagcacgcgggagtccggctgcccacccatggcagggtctaccagaagggccacgagctggtgttggccaatattgctgaaagtgatgctggtgtctacacctgccacgcggccaacctggctggtcagcggagacaggatgtcaacatcactgtggccactgtgccctcctggctgaagaagccccaagacagccagctggaggagggcaaacccggctacttggattgcctgacccaggccacaccaaaacctacagttgtctggtacagaaaccagatgctcatctcagaggactcacggttcgaggtcttcaagaatgggaccttgcgcatcaacagcgtggaggtgtatgatgggacatggtaccgttgtatgagcagcaccccagccggcagcatcgaggcgcaagcccgtgtccaagtgctggatgggagcagcctcccagagtgggtgacagacaacgctgggaccctgcattttgcccgggtgactcgagatgacgctggcaactacacttgcattgcctccaacgggccgcagggccagattcgtgcccatgtccagctcactgtggcagtttttatcaccttcaaagtggaaccagagcgtacgactgtgtaccagggccacacagccctactgcagtgcgaggcccagggggaccccaagccgctgattcagtggaaaggcaaggaccgcatcctggaccccaccaagctgggacccaggatgcacatcttccagaatggctccctggtgatccatgacgtggcccctgaggactcaggccgctacacctgcattgcaggcaacagctgcaacatcaagcacacggaggcccccctctatgtcgtggacaagcctgtgccggaggagtcggagggccctggcagccctcccccctacaagatgatccagaccattgggttgtcggtgggtgccgctgtggcctacatcattgccgtgctgggcctcatgttctactgcaagaagcgctgcaaagccaagcggctgcagaagcagcccgagggcgaggagccagagatggaatgcctcaacggtgggcctttgcagaacgggcagccctcagcagagatccaagaagaagtggccttgaccagcttgggctccggccccgcggccaccaacaaacgccacagcacaagtgataagatgcacttcccacggtctagcctgcagcccatcaccacgctggggaagagtgagtttggggaggtgttcctggcaaaggctcagggcttggaggagggagtggcagagaccctggtacttgtgaagagcctgcagagcaaggatgagcagcagcagctggacttccggagggagttggagatgtttgggaagctgaaccacgccaacgtggtgcggctcctggggctgtgccgggaggctgagccccactacatggtgctggaatatgtggatctgggagacctcaagcagttcctgaggatttccaagagcaaggatgaaaaattgaagtcacagcccctcagcaccaagcagaaggtggccctatgcacccaggtagccctgggcatggagcacctgtccaacaaccgctttgtgcataaggacttggctgcgcgtaactgcctggtcagtgcccagagacaagtgaaggtgtctgccctgggcctcagcaaggatgtgtacaacagtgagtactaccacttccgccaggcctgggtgccgctgcgctggatgtcccccgaggccatcctggagggtgacttctctaccaagtctgatgtctgggccttcggtgtgctgatgtgggaagtgtttacacatggagagatgccccatggtgggcaggcagatgatgaagtactggcagatttgcaggctgggaaggctagacttcctcagcccgagggctgcccttccaaactctatcggctgatgcagcgctgctgggccctcagccccaaggaccggccctccttcagtgagattgccagcgccctgggagacagcaccgtggacagcaagccgtgaggagggagcccgctcaggatggcctgggcaggggaggacatctctagagggaagctcacagcatgatgggcaagatccctgtcctcctgggccctgaggcccctgccctagtgcaacaggcattgctgaggtctgagcagggcctggcctttcctcctcttcctcaccctcatcctttgggaggctgacttggacccaaactgggcgactagggctttgagctgggcagttttccctgccacctcttcctctatcagggacagtgtgggtgccacaggtaaccccaatttctggccttcaacttctccccttgaccgggtccaactctgccactcatctgccaactttgcctggggagggctaggcttgggatgagctgggtttgtggggagttccttaatattctcaagttctgggcacacagggttaatgagtctcttggcccactggtcccacttgggggtctagaccaggattatagaggacacagcaagtgagtcctccccactctgggcttgtgcacactgacccagacccacgtcttccccacccttctctcctttcctcatcctaagtgcctggcagatgaaggagttttcaggagcttttgacactatataaaccgccctttttgtatgcaccacgggcggcttttatatgtaattgcagcgtggggtgggtgggcatgggaggtaggggtgggccctggagatgaggagggtgggccatccttaccccacacttttattgttgtcgttttttgtttgttttgtttttttgtttttgtttttgtttttacactcgctgctctcaataaataagccttttttacaacctg

SEQ ID NO: 1093 - DNA, 287 bp, Artificial
  Synthetic oligonucleotide
ggcggcggcggcggcgcgcggggactcggaggtactgggcgcgcgcggctccggctcgggacgcctcgggacgcctcggggtcgggctccggctgcggctgctgctgcggcgcccgcgctccggtgcgctccgcctcctgtgcccgccgcggagcgcagtctgcgcgcccgccgtgcgccctcagctccttttcctgagcccgccgcgatgggagctgcgcggggatccccggccagaccccgccggttgcctctgctcagcgtcctgctgctgccgctgctgggcg

SEQ ID NO: 1094 - DNA, 164 bp, Artificial
  Synthetic oligonucleotide
gtacccagacagccattgtcttcatcaagcagccgtcctcccaggatgcactgcaggggcgccgggcgctgcttcgctgtgaggttgaggctccgggcccggtacatgtgtactggctgctcgatggggcccctgtccaggacacggagcggcgtttcgcccag

SEQ ID NO: 1095 - DNA, 124 bp, Artificial
  Synthetic oligonucleotide
ggcagcagcctgagctttgcagctgtggaccggctgcaggactctggcaccttccagtgtgtggctcgggatgatgtcactggagaagaagcccgcagtgccaacgcctccttcaacatcaaat

SEQ ID NO: 1096 - DNA, 397 bp, Artificial
  Synthetic oligonucleotide
gtgagagccaggggggctgtgcccagtccccctgtcagaccctcaatgactgaggcctgggggatccctcccttacctcagcttctcccatttccagttaaacgggccaggcagaatgcatttatcatcagctttttttgctcatgtggataagaggaaattaaaagttatattttttccaaaattttttccttcaagtctgggacccatttatctgctgcatgcttgtgcaaatggaaagggcggccgagcccttggccaagtgtcagacttgacctgccagggaccaggcaggcacttagtatctggtaactgtagccccagcctcagcctccagggcttccttgtgtctgttggcacagagcctcgaggttccacggcttcctgcttgtcctcc

SEQ ID NO: 1097 - DNA, 191 bp, Artificial
  Synthetic oligonucleotide
gcccacctaccaatggttccgagatgggacccccctttctgatggtcagagcaaccacacagtcagcagcaaggagcggaacctgacgctccggccagctggtcctgagcatagtgggctgtattcctgctgcgcccacagtgcttttggccaggcttgcagcagccagaacttcaccttgagcattgctg

SEQ ID NO: 1098 - DNA, 151 bp, Artificial
  Synthetic oligonucleotide
atgaaagctttgccagggtggtgctggcaccccaggacgtggtagtagcgaggtatgaggaggccatgttccattgccagttctcagcccagccacccccgagcctgcagtggctctttgaggatgagactcccatcactaaccgcagtcg

SEQ ID NO: 1099 - DNA, 149 bp, Artificial
  Synthetic oligonucleotide
ccccccacacctccgcagagccacagtgtttgccaacgggtctctgctgctgacccaggtccggccacgcaatgcagggatctaccgctgcattggccaggggcagaggggcccacccatcatcctggaagccacacttcacctagcag

SEQ ID NO: 1100 - DNA, 199 bp, Artificial
  Synthetic oligonucleotide
cttccccccaagggtctgccagagcccagcgtgtggtgggagcacgcgggagtccggctgcccacccatggcagggtctaccagaagggccacgagctggtgttggccaatattgctgaaagtgatgctggtgtctacacctgccacgcggccaacctggctggtcagcggagacaggatgtcaacatcactgtggcca

SEQ ID NO: 1101 - DNA, 1363 bp, Artificial
  Synthetic oligonucleotide
gtgagcacctttgccctgaaggtcaaggagaggtggaggggaacacaggtctgggtgtgatggacagaggcttccctggtactcacctgaggtcctctcagttctgggccctgcaggcttgggaatcagttcactactgggagtcggtgtagacagtagagagccaggcacaggggttagggtgggtgctccagaggaaatagtgacagccctcacagaaaaatggtcctctgggtacagaggaaagagcaatagactaggaatctagagacctgggtcccactatgctcccaatgcacagagtgacgatggtagcaaatcacccaccttactggggttcagtctcctcatccataaaatggagccagtaatctactacctaccccacaaggtggttggaaaggtcaaatgaagtagatgaaaatgatttttctttttttcttttttgggaggtaatagtggacaaaattataggtgatttttaatttgttttagtttgttatgctttccaaatttctttactaaacatattacttatgaaaaaaaagagggggagaaaagcaagacatatgactgaaagtacacatgataaaccctttatatcaggctgggcgcggtggctcatgcctgtaatcccagcactttgggaggccgagccgggcggatcacaaggtcaggagttggagaccagcctgaccaacatggtgaaaccccatctctactaaaaatacaaaaattagctgggcgtggtggggcacacctgtaatcccagctactcaggaggctgagggaggaaaattgcttgaacccaggaggcagaggttgcaatgagctgagatcgcaccgttgctcttcagcccgggcaacagagtgagactccatctcaaaacaaaacaaaacaaaccttatatcctcactacaggcatagggatttatttgtttacttatttctttataccatgccttgttccaaaccttttgtggtagtttaaaaggatacacaataaaaattacaatatgcacacagagacacacatacatacaaactattttgcaatctgcttcttccacttacctttatgttactattatctttccgagtgggtaactttgcaaaaagatttgaatatgaaagtggctttgtaaatgtgaagttgtgatgctagtattcccattaggatactgaaatcttagaagacatgcacctatactcaggccgtgatttgggtgggaatcacagcacatgtgtaacgagtgctcaggacactcacagtgcaggtgcaaaggcaagatgcacagtcaagccttcctccagttgaggtctgagaatcacctgctttcattagggatactttttcttctt

SEQ ID NO: 1102 - DNA, 134 bp, Artificial
  Synthetic oligonucleotide
ctgtgccctcctggctgaagaagccccaagacagccagctggaggagggcaaacccggctacttggattgcctgacccaggccacaccaaaacctacagttgtctggtacagaaaccagatgctcatctcagag

SEQ ID NO: 1103 - DNA, 121 bp, Artificial
  Synthetic oligonucleotide
gtcttcaagaatgggaccttgcgcatcaacagcgtggaggtgtatgatgggacatggtaccgttgtatgagcagcaccccagccggcagcatcgaggcgcaagcccgtgtccaagtgctgg

SEQ ID NO: 1104 - DNA, 120 bp, Artificial
  Synthetic oligonucleotide
aaaagctcaagttcacaccaccaccccagccacagcagtgcatggagtttgacaaggaggccacggtgccctgttcagccacaggccgagagaagcccactattaagtgggaacgggcag

SEQ ID NO: 1105 - DNA, 150 bp, Artificial
  Synthetic oligonucleotide
atgggagcagcctcccagagtgggtgacagacaacgctgggaccctgcattttgcccgggtgactcgagatgacgctggcaactacacttgcattgcctccaacgggccgcagggccagattcgtgcccatgtccagctcactgtggcag

SEQ ID NO: 1106 - DNA, 478 bp, Artificial
  Synthetic oligonucleotide
gtatgggctggggagggttatgctgcacaggaagtggtgggcccagacgtttgtcaccttgtactcagcccctgtgtacagaacatggcacagaagccatttttgtggcagcggtggggattcggccgtctcaccatgctgctgcacagtcttagagtccttgctcagagccgggctgtcgtttatttaacatccaacggtcggtgtgtgtgtgtgtgtgttgtgggggagtgggggggtgttctcttcctacaatgctgcctcccaggttcctgcagcagccacacatatctctgggtggctggggaggaggaccaggtcagaatgcagtaggacaaggttcttttctccaggaggcccagagaggatgatgggtcaggtaaaaggccctgcacttaactctctgcccctgggagacttatttctcctctggggacttgtttctgcatccacaggtgaaagtggtttaaatgagaag

SEQ ID NO: 1107 - DNA, 639 bp, Artificial
  Synthetic oligonucleotide
ctcttaaactttcttggtttggcagcagagttatttttctagacaaagtataatgtgaaagtttaaatggatgaaaatgaactgaggaggcccccttggtgggagccactggggtgtgtgtggcagttgggggatcctgcatggtctcccttcattcccctaatgcctcttgaggcccctcagtgtgggccattaaaaggcccctagaccagcagatcccttctacagatctgcttattgaaaaacctgctctgtgccaggcagtgcctggaattctaaacctgaagctcccaaatgctgctctccggggcctggctcacattatcaagtcacttgggaagcttaacaaataacgtgggtttgtggtagctccttgacaggtgtgcttatccgtgtcgcctgtcttggcttccgatgcaaagccagcttgggaacccctggcctcatctccttcagagtcttcgtttgaccttggtggggcatgaggacctgctggcccttgttaaagccagtgaaggtggtgaccctcccgggccatctgttaagttgccctgttgatggggttgggaggagttagtagagaagcagggcttcttttgcttagcagcccctgcccagacccatctgtgtgtctctcag

SEQ ID NO: 1108 - DNA, 830 bp, Artificial
  Synthetic oligonucleotide
gtgaggggccctggacggggaggtggtgcccgtgtgcgggagctgagcgccctcccgcggccacggaggggagagcgccagcactctggaaaccgagcggctgttgctgggtcctggagctgggactgccccacccctagcgggaagcctggagttggattcccagggcctcgtcttctgagcaacctggcttgagacttcttcattggagccccttggaccagcttcctatgattccctgctgtttcctcctcccagcacaaaaccacagatatcattagtatatgtacacacgttgctgttgcatgtcttgtctccctctatgagtctaagagctcccccaggggcagtctttctgtttacttcccttctcctatccccacttcctggactgggagctccttgaggtcattgctgggtctctcctatcagctcaggtgttcaggagcagaggttgggtctccattattgtgattttccctttgtgcctgtttagggctttgcccaataggaggccccatgaaagcaaaaatccttatgtgtagctatggtattaaggaccagtgattcagattagatgtctgcagttggcttcatctcagaggtcataatcagctgcatcactaaggggtcataccctaggggatagccatacatcccccacccagccccagccccattatttcatcatttgggcttgccctttcatgtggagcactgtgattggacccaagttggcaagagtggaagaccaggggacagaacagaaatccccatggtggccagagtgtcaggtctcatcgtgacgctcttgtcctcctccttcccag

SEQ ID NO: 1109 - DNA, 249 bp, Artificial
  Synthetic oligonucleotide
gtatgttgccttgactacagctgcccctgcctaactacaagtcacccgctgtgtcttgaggctgggtacgggctagtgttctgaagtccctgaaacctagaatgttagaggtggagggaagcataggtagagatctagcccagtgtggccccagagcctgttattcactgcccttcgtgcagattttgtcattcctgtgtactacctgtagtattatttacttgatgttttatttaaattgactcttta

SEQ ID NO: 1110 - DNA, 213 bp, Artificial
  Synthetic oligonucleotide
gtgttcctggcaaaggctcagggcttggaggagggagtggcagagaccctggtacttgtgaagagcctgcagagcaaggatgagcagcagcagctggacttccggagggagttggagatgtttgggaagctgaaccacgccaacgtggtgcggctcctggggctgtgccgggaggctgagccccactacatggtgctggaatatgtggatctg

SEQ ID NO: 1111 - DNA, 152 bp, Artificial
  Synthetic oligonucleotide
gtggccctatgcacccaggtagccctgggcatggagcacctgtccaacaaccgctttgtgcataaggacttggctgcgcgtaactgcctggtcagtgcccagagacaagtgaaggtgtctgccctgggcctcagcaaggatgtgtacaacag

SEQ ID NO: 1112 - DNA, 122 bp, Artificial
  Synthetic oligonucleotide
tgagtactaccacttccgccaggcctgggtgccgctgcgctggatgtcccccgaggccatcctggagggtgacttctctaccaagtctgatgtctgggccttcggtgtgctgatgtgggaag

SEQ ID NO: 1113 - DNA, 700 bp, Artificial
  Synthetic oligonucleotide
atttgcaggctgggaaggctagacttcctcagcccgagggctgcccttccaaactctatcggctgatgcagcgctgctgggccctcagccccaaggaccggccctccttcagtgagattgccagcgccctgggagacagcaccgtggacagcaagccgtgaggagggagcccgctcaggatggcctgggcaggggaggacatctctagagggaagctcacagcatgatgggcaagatccctgtcctcctgggccctgaggcccctgccctagtgcaacaggcattgctgaggtctgagcagggcctggcctttcctcctcttcctcaccctcatcctttgggaggctgacttggacccaaactgggcgactagggctttgagctgggcagttttccctgccacctcttcctctatcagggacagtgtgggtgccacaggtaaccccaatttctggccttcaacttctccccttgaccgggtccaactctgccactcatctgccaactttgcctggggagggctaggcttgggatgagctgggtttgtggggagttccttaatattctcaagttctgggcacacagggttaatgagtctcttggcccactggtcccacttgggggtctagaccaggattatagaggacacagcaagtgagtcctccccactctgggcttgtgcacactgacccagacccac

SEQ ID NO: 1114 - DNA, 253 bp, Artificial
  Synthetic oligonucleotide
atgaaggagttttcaggagcttttgacactatataaaccgccctttttgtatgcaccacgggcggcttttatatgtaattgcagcgtggggtgggtgggcatgggaggtaggggtgggccctggagatgaggagggtgggccatccttaccccacacttttattgttgtcgttttttgtttgttttgtttttttgtttttgtttttgtttttacactcgctgctctcaataaataagccttttttacaacctg

SEQ ID NO: 1115 - DNA, 103 bp, Artificial
  Synthetic oligonucleotide
ggattgaggcaggtcctgtggtcctgaagcatccagcctcggaagctgagatccagccacagacccaggtcacacttcgttgccacattgatgggcaccctcg

SEQ ID NO: 1116 - DNA, 90 bp, Artificial
  Synthetic oligonucleotide
gtgagcctggggtgggggcggaagggatgaggtgagcacaggagggcctcaccacccaggctgcatgctcccccatctttccctctccag

SEQ ID NO: 1117 - DNA, 68 bp, Artificial
  Synthetic oligonucleotide
agattgaagacatgccgctatttgagccacgggtgtttacagctggcagcgaggagcgtgtgacctgc

SEQ ID NO: 1118 - DNA, 15 bp, Artificial
  Synthetic oligonucleotide
gactcacggttcgag

SEQ ID NO: 1119 - DNA, 111 bp, Artificial
  Synthetic oligonucleotide
tttttatcaccttcaaagtggaaccagagcgtacgactgtgtaccagggccacacagccctactgcagtgcgaggcccagggggaccccaagccgctgattcagtggaaag

SEQ ID NO: 1120 - DNA, 40 bp, Artificial
  Synthetic oligonucleotide
gcaaggaccgcatcctggaccccaccaagctgggacccag

SEQ ID NO: 1121 - DNA, 16 bp, Artificial
  Synthetic oligonucleotide
gatgcacatcttccag

SEQ ID NO: 1122 - DNA, 112 bp, Artificial
  Synthetic oligonucleotide
aatggctccctggtgatccatgacgtggcccctgaggactcaggccgctacacctgcattgcaggcaacagctgcaacatcaagcacacggaggcccccctctatgtcgtgg

SEQ ID NO: 1123 - DNA, 5 bp, Artificial
  Synthetic oligonucleotide
acaag

SEQ ID NO: 1124 - DNA, 119 bp, Artificial
  Synthetic oligonucleotide
cctgtgccggaggagtcggagggccctggcagccctcccccctacaagatgatccagaccattgggttgtcggtgggtgccgctgtggcctacatcattgccgtgctgggcctcatgtt

SEQ ID NO: 1125 - DNA, 64 bp, Artificial
  Synthetic oligonucleotide
ctactgcaagaagcgctgcaaagccaagcggctgcagaagcagcccgagggcgaggagccagag

SEQ ID NO: 1126 - DNA, 16 bp, Artificial
  Synthetic oligonucleotide
atggaatgcctcaacg

SEQ ID NO: 1127 - DNA, 75 bp, Artificial
  Synthetic oligonucleotide
gtgggcctttgcagaacgggcagccctcagcagagatccaagaagaagtggccttgaccagcttgggctccggcc

SEQ ID NO: 1128 - DNA, 30 bp, Artificial
  Synthetic oligonucleotide
ccgcggccaccaacaaacgccacagcacaa

SEQ ID NO: 1129 - DNA, 36 bp, Artificial
  Synthetic oligonucleotide
gtgataagatgcacttcccacggtctagcctgcagc

SEQ ID NO: 1130 - DNA, 15 bp, Artificial
  Synthetic oligonucleotide
ccatcaccacgctgg

SEQ ID NO: 1131 - DNA, 20 bp, Artificial
  Synthetic oligonucleotide
ggaagagtgagtttggggag

SEQ ID NO: 1132 - DNA, 81 bp, Artificial
  Synthetic oligonucleotide
ggagacctcaagcagttcctgaggatttccaagagcaaggatgaaaaattgaagtcacagcccctcagcaccaagcagaag

SEQ ID NO: 1133 - DNA, 42 bp, Artificial
  Synthetic oligonucleotide
tgtttacacatggagagatgccccatggtgggcaggcagatg

SEQ ID NO: 1134 - DNA, 15 bp, Artificial
  Synthetic oligonucleotide
atgaagtactggcag

SEQ ID NO: 1135 - DNA, 7 bp, Artificial
  Synthetic oligonucleotide
gtcttcc

SEQ ID NO: 1136 - DNA, 23 bp, Artificial
  Synthetic oligonucleotide
ccacccttctctcctttcctcat

SEQ ID NO: 1137 - DNA, 16 bp, Artificial
  Synthetic oligonucleotide
cctaagtgcctggcag

SEQ ID NO: 1138 - DNA, 55 bp, Artificial
  Synthetic oligonucleotide
gcggcccgcttggctggtggggcccgcggcgggattttcccgggcggcgagagcg

SEQ ID NO: 1139 - DNA, 89 bp, Artificial
  Synthetic oligonucleotide
gatctatcttgggatcccatggctttctttactgggctctggggccccttcacctgtgtaagcagagtgctgagccatcactgtttcag

SEQ ID NO: 1140 - DNA, 69 bp, Artificial
  Synthetic oligonucleotide
caccactgggagtctgagtgcgattcagaagatgacgcgggtacgagtggtggacaacagtgccctggg

SEQ ID NO: 1141 - protein, 1070 aa, Homo sapiens [sequence omitted]

SEQ ID NO: 1142 - protein, 1070 aa, Homo sapiens
MGAARGSPARPRRLPLLSVLLLPLLGGTQTAIVFIKQPSSQDALQGRRALLRCEVEAPGPVHVYWLLDGAPVQDTERRFAQGSSLSFAAVDRLQDSGTFQCVARDDVTGEEARSANASFNIKWIEAGPVVLKHPASEAEIQPQTQVTLRCHIDGHPRPTYQWFRDGTPLSDGQSNHTVSSKERNLTLRPAGPEHSGLYSCCAHSAFSQACSSQNFTLSIADESFARVVLAPQDVVVARYEEAMFHCQFSAQPPPSLQWLFEDETPITNRSRPPHLRRATVFANGSLLLTQVRPRNAGIYRCIGQGQRGPPIILEATLHLAEIEDMPLFEPRVFTAGSEERVTCLPPKGLPEPSVWWEHAGVRLPTHGRVYQKGHELVLANIAESDAGVYTCHAANLAGQRRQDVNITVATVPSWLKKPQDSQLEEGKPGYLDCLTQATPKPTVVWYRNQMLISEDSRFEVFKNGTLRINSVEVYDGTWYRCMSSTPAGSIEAQAVLQVLEKLKFTPPPQPQQCMGFDKEATVPCSATGREKPTIKWERADGSSLPEWVTDNAGTLHFARVTRDDAGNYTCIASNGPQGQIRAHVQLTVAVFITFKVEPERTTVYQGHTALLQCEAQGDPKPLIQWKGKDRILDPTKLGPRMHIFQNGSLVIHDVAPEDSGRYTCIAGNSCNIKHTEAPLYVVDKPVPEESEGPGSPPPYKMIQTIGLSVGAAVAYIIAVLGLMFYCKKRCKAKRLQKQPEGEEPEMECLNGGPLQNGQPSAEIQEEVALTSLGSGPAATNKRHSTSDKMHFPRSSLQPITTLGKSEFGEVFLAKAQGLEEGVAETLVLVKSLQSKDEQQQLDFRRELEMFGKLNHANVVRLLGLCREAEPHYMVLEYVDLEDLKQFLRISKSKDEKLKSQPLSTKQKVALCTQVALGMEHLSNNRFVHKDLAARNCLVSAQRQVKVSALGLSKDVYNSEYYHFRQAWVALRWMSPEAILEGDFSTKSDVWASGVLMWEVFTHGEMPHGGQADDEVLADLQAGKARLPQPEGCPSKLYRLMQRCWALSPKDRPSFSEIASALGDSTVDSKP

SEQ ID NO: 1143 - protein, 1070 aa, Homo sapiens
MGAARGSPARPRRLPLLSVLLLPLLGGTQTAIVFIKQPSSQDALQGRRALLRCEVEAPGPVHVYWLLDGAPVQDTERRFAQGSSLSFAAVDRLQDSGTFQCVARDDVTGEEARSANASFNIKWIEAGPVVLKHPASEAEIQPQTQVTLRCHIDGHPRPTYQWFRDGTPLSDGQSNHTVSSKERNLTLRPAGPEHSGLYSCCAHSAFGQACSSQNFTLSIADESFARVVLAPQDVVVARYEEAMFHCQFSAQPPPSLQWLFEDETPITNRSRPPHLRRATVFANGSLLLTQVRPRNAGIYRCIGQGQRGPPIILEATLHLAEIEDMPLFEPRVFTAGSEERVTCLPPKGLPEPSVWWEHAGVRLPTHGRVYQKGHELVLANIAESDAGVYTCHAANLAGQRRQDVNITVATVPSWLKKPQDSQLEEGKPGYLDCLTQATPKPTVVWYRNQMLISEDSRFEVFKNGTLRINSVEVYDGTWYRCMSSTPAGSIEAQARVQVLEKLKFTPPPQPQQCMEFDKEATVPCSATGREKPTIKWERADGSSLPEWVTDNAGTLHFARVTRDDAGNYTCIASNGPQGQIRAHVQLTVAVFITFKVEPERTTVYQGHTALLQCEAQGDPKPLIQWKGKDRILDPTKLGPRMHIFQNGSLVIHDVAPEDSGRYTCIAGNSCNIKHTEAPLYVVDKPVPEESEGPGSPPPYKMIQTIGLSVGAAVAYIIAVLGLMFYCKKRCKAKRLQKQPEGEEPEMECLNGGPLQNGQPSAEIQEEVALTSLGSGPAATNKRHSTSDKMHFPRSSLQPITTLGKSEFGEVFLAKAQGLEEGVAETLVLVKSLQSKDEQQQLDFRRELEMFGKLNHANVVRLLGLCREAEPHYMVLEYVDLEDLKQFLRISKSKDEKLKSQPLSTKQKVALCTQVALGMEHLSNNRFVHKDLAARNCLVSAQRQVKVSALGLSKDVYNSEYYHFRQAWVALRWMSPEAILEGDFSTKSDVWASGVLMWEVFTHGEMPHGGQADDEVLADLQAGKARLPQPEGCPSKLYRLMQRCWALSPKDRPSFSEIASALGDSTVDSKP

SEQ ID NO: 1144 - protein, 1070 aa, Homo sapiens
MGAARGSPARPRRLPLLSVLLLPLLGGTQTAIVFIKQPSSQDALQGRRALLRCEVEAPGPVHVYWLLDGAPVQDTERRFAQGSSLSFAAVDRLQDSGTFQCVARDDVTGEEARSANASFNIKWIEAGPVVLKHPASEAEIQPQTQVTLRCHIDGHPRPTYQWFRDGTPLSDGQSNHTVSSKERNLTLRPAGPEHSGLYSCCAHSAFGQACSSQNFTLSIADESFARVVLAPQDVVVARYEEAMFHCQFSAQPPPSLQWLFEDETPITNRSRPPHLRRATVFANGSLLLTQVRPRNAGIYRCIGQGQRGPPIILEATLHLAEIEDMPLFEPRVFTAGSEERVTCLPPKGLPEPSVWWEHAGVRLPTHGRVYQKGHELVLANIAESDAGVYTCHAANLAGQRRQDVNITVATVPSWLKKPQDSQLEEGKPGYLDCLTQATPKPTVVWYRNQMLISEDSRFEVFKNGTLRINSVEVYDGTWYRCMSSTPAGSIEAQAVLQVLEKLKFTPPPQPQQCMGFDKEATVPCSATGREKPTIKWERADGSSLPEWVTDNAGTLHFARVTRDDAGNYTCIASNGPQGQIRAHVQLTVAVFITFKVEPERTTVYQGHTALLQCEAQGDPKPLIQWKGKDRILDPTKLGPRMHIFQNGSLVIHDVAPEDSGRYTCIAGNSCNIKHTEAPLYVVDKPVPEESEGPGSPPPYKMIQTIGLSVGAAVAYIIAVLGLMFYCKKRCKAKRLQKQPEGEEPEMECLNGGPLQNGQPSAEIQEEVALTSLGSGPAATNKRHSTSDKMHFPRSSLQPITTLGKSEFGEVFLAKAQGLEEGVAETLVLVKSLQSKDEQQQLDFRRELEMFGKLNHANVVRLLGLCREAEPHYMVLEYVDLEDLKQFLRISKSKDEKLKSQPLSTKQKVALCTQVALGMEHLSNNRFVHKDLAARNCLVSAQRQVKVSALGLSKDVYNSEYYHFRQAWVALRWMSPEAILEGDFSTKSDVWASGVLMWEVFTHGEMPHGGQADDEVLADLQAGKARLPQPEGCPSKLYRLMQRCWALSPKDRPSFSEIASALGDSTVDSKP

SEQ ID NO: 1145 - protein, 1070 aa, Homo sapiens
MGAARGSPARPRRLPLLSVLLLPLLGGTQTAIVFIKQPSSQDALQGRRALLRCEVEAPGPVHVYWLLDGAPVQDTERRFAQGSSLSFAAVDRLQDSGTFQCVARDDVTGEEARSANASFNIKWIEAGPVVLKHPASEAEIQPQTQVKLRCHIDGHPRPTYQWFRDGTPLSDGQSNHTVSSKERNLTLRPAGPEHSGLYSCCAHSAFSQACSSQNFTLSIADESFARVVLAPQDVVVARYEEAMFHCQFSAQPPPSLQWLFEDETPITNRSRPPHLRRATVFANGSLLLTQVRPRNAGIYRCIGQGQRGPPIILEATLHLAEIEDMPLFEPRVFTAGSEERVTCLPPKGLPEPSVWWEHAGVRLPTHGRVYQKGHELVLANIAESDAGVYTCHAANLAGQRRQDVNITVATVPSWLKKPQDSQLEEGKPGYLDCLTQATPKPTVVWYRNQMLISEDSRFEVFKNGTLRINSVEVYDGTWYRCMSSTPAGSIEAQAVLQVLEKLKFTPPPQPQQCMGFDKEATVPCSATGREKPTIKWERADGSSLPEWVTDNAGTLHFARVTRDDAGNYTCIASNGPQGQIRAHVQLTVAVFITFKVEPERTTVYQGHTALLQCEAQGDPKPLIQWKGKDRILDPTKLGPRMHIFQNGSLVIHDVAPEDSGRYTCIAGNSCNIKHTEAPLYVVDKPVPEESEGPGSPPPYKMIQTIGLSVGAAVAYIIAVLGLMFYCKKRCKAKRLQKQPEGEEPEMECLNGGPLQNGQPSAEIQEEVALTSLGSGPAATNKRHSTSDKMHFPRSSLQPITTLGKSEFGEVFLAKAQGLEEGVAETLVLVKSLQSKDEQQQLDFRRELEMFGKLNHANVVRLLGLCREAEPHYMVLEYVDLEDLKQFLRISKSKDEKLKSQPLSTKQKVALCTQVALGMEHLSNNRFVHKDLAARNCLVSAQRQVKVSALGLSKDVYNSEYYHFRQAWVALRWMSPEAILEGDFSTKSDVWASGVLMWEVFTHGEMPHGGQADDEVLADLQAGKARLPQPEGCPSKLYRLMQRCWALSPKDRPSFSEIASALGDSTVDSKP

SEQ ID NO: 1146 - protein, 1030 aa, Homo sapiens
MGAARGSPARPRRLPLLSVLLLPLLGGTQTAIVFIKQPSSQDALQGRRALLRCEVEAPGPVHVYWLLDGAPVQDTERRFAQGSSLSFAAVDRLQDSGTFQCVARDDVTGEEARSANASFNIKWIEAGPVVLKHPASEAEIQPQTQVTLRCHIDGHPRPTYQWFRDGTPLSDGQSNHTVSSKERNLTLRPAGPEHSGLYSCCAHSAFGQACSSQNFTLSIADESFARVVLAPQDVVVARYEEAMFHCQFSAQPPPSLQWLFEDETPITNRSRPPHLRRATVFANGSLLLTQVRPRNAGIYRCIGQGQRGPPIILEATLHLAEIEDMPLFEPRVFTAGSEERVTCLPPKGLPEPSVWWEHAGVRLPTHGRVYQKGHELVLANIAESDAGVYTCHAANLAGQRRQDVNITVATVPSWLKKPQDSQLEEGKPGYLDCLTQATPKPTVVWYRNQMLISEDSRFEVFKNGTLRINSVEVYDGTWYRCMSSTPAGSIEAQARVQVLDGSSLPEWVTDNAGTLHFARVTRDDAGNYTCIASNGPQGQIRAHVQLTVAVFITFKVEPERTTVYQGHTALLQCEAQGDPKPLIQWKGKDRILDPTKLGPRMHIFQNGSLVIHDVAPEDSGRYTCIAGNSCNIKHTEAPLYVVDKPVPEESEGPGSPPPYKMIQTIGLSVGAAVAYIIAVLGLMFYCKKRCKAKRLQKQPEGEEPEMECLNGGPLQNGQPSAEIQEEVALTSLGSGPAATNKRHSTSDKMHFPRSSLQPITTLGKSEFGEVFLAKAQGLEEGVAETLVLVKSLQSKDEQQQLDFRRELEMFGKLNHANVVRLLGLCREAEPHYMVLEYVDLGDLKQFLRISKSKDEKLKSQPLSTKQKVALCTQVALGMEHLSNNRFVHKDLAARNCLVSAQRQVKVSALGLSKDVYNSEYYHFRQAWVPLRWMSPEAILEGDFSTKSDVWAFGVLMWEVFTHGEMPHGGQADDEVLADLQAGKARLPQPEGCPSKLYRLMQRCWALSPKDRPSFSEIASALGDSTVDSKP

SEQ ID NO: 1147 - protein, 816 aa, Homo sapiens
MGAARGSPARPRRLPLLSVLLLPLLGGTQTAIVFIKQPSSQDALQGRRALLRCEVEAPGPVHVYWLLDGAPVQDTERRFAQGSSLSFAAVDRLQDSGTFQCVARDDVTGEEARSANASFNIKWIEAGPVVLKHPASEAEIQPQTQVTLRCHIDGHPRPTYQWFRDGTPLSDGQSNHTVSSKERNLTLRPAGPEHSGLYSCCAHSAFGQACSSQNFTLSIADESFARVVLAPQDVVVARYEEAMFHCQFSAQPPPSLQWLFEDETPITNRSRPPHLRRATVFANGSLLLTQVRPRNAGIYRCIGQGQRGPPIILEATLHLAEIEDMPLFEPRVFTAGSEERVTCLPPKGLPEPSVWWEHAGVRLPTHGRVYQKGHELVLANIAESDAGVYTCHAANLAGQRRQDVNITVATVPSWLKKPQDSQLEEGKPGYLDCLTQATPKPTVVWYRNQMLISEDSRFEVFKNGTLRINSVEVYDGTWYRCMSSTPAGSIEAQARVQVLEKLKFTPPPQPQQCMEFDKEATVPCSATGREKPTIKWERADGSSLPEWVTDNAGTLHFARVTRDDAGNYTCIASNGPQGQIRAHVQLTVAVFITFKVEPERTTVYQGHTALLQCEAQGDPKPLIQWKGKDRILDPTKLGPRMHIFQNGSLVIHDVAPEDSGRYTCIAGNSCNIKHTEAPLYVVDKPVPEESEGPGSPPPYKMIQTIGLSVGAAVAYIIAVLGLMFYCKKRCKAKRLQKQPEGEEPEMECLNGGPLQNGQPSAEIQEEVALTSLGSGPAATNKRHSTSDKMHFPRSSLQPITTLGRPQAVPEDFQEQG

SEQ ID NO: 1148 - protein, 940 aa, Homo sapiens
MGAARGSPARPRRLPLLSVLLLPLLGGTQTAIVFIKQPSSQDALQGRRALLRCEVEAPGPVHVYWLLDGAPVQDTERRFAQGSSLSFAAVDRLQDSGTFQCVARDDVTGEEARSANASFNIKWIEAGPVVLKHPASEAEIQPQTQVTLRCHIDGHPRPTYQWFRDGTPLSDGQSNHTVSSKERNLTLRPAGPEHSGLYSCCAHSAFGQACSSQNFTLSIADESFARVVLAPQDVVVARYEEAMFHCQFSAQPPPSLQWLFEDETPITNRSRPPHLRRATVFANGSLLLTQVRPRNAGIYRCIGQGQRGPPIILEATLHLAEIEDMPLFEPRVFTAGSEERVTCLPPKGLPEPSVWWEHAGVRLPTHGRVYQKGHELVLANIAESDAGVYTCHAANLAGQRRQDVNITVANGSSLPEWVTDNAGTLHFARVTRDDAGNYTCIASNGPQGQIRAHVQLTVAVFITFKVEPERTTVYQGHTALLQCEAQGDPKPLIQWKGKDRILDPTKLGPRMHIFQNGSLVIHDVAPEDSGRYTCIAGNSCNIKHTEAPLYVVDKPVPEESEGPGSPPPYKMIQTIGLSVGAAVAYIIAVLGLMFYCKKRCKAKRLQKQPEGEEPEMECLNGGPLQNGQPSAEIQEEVALTSLGSGPAATNKRHSTSDKMHFPRSSLQPITTLGKSEFGEVFLAKAQGLEEGVAETLVLVKSLQSKDEQQQLDFRRELEMFGKLNHANVVRLLGLCREAEPHYMVLEYVDLGDLKQFLRISKSKDEKLKSQPLSTKQKVALCTQVALGMEHLSNNRFVHKDLAARNCLVSAQRQVKVSALGLSKDVYNSEYYHFRQAWVPLRWMSPEAILEGDFSTKSDVWAFGVLMWEVFTHGEMPHGGQADDEVLADLQAGKARLPQPEGCPSKLYRLMQRCWALSPKDRPSFSEIASALGDSTVDSKP

SEQ ID NO: 1149 - protein, 1014 aa, Homo sapiens
MGAARGSPARPRRLPLLSVLLLPLLGGTQTAIVFIKQPSSQDALQGRRALLRCEVEAPGPVHVYWLLDGAPVQDTERRFAQGSSLSFAAVDRLQDSGTFQCVARDDVTGEEARSANASFNIKWIEAGPVVLKHPASEAEIQPQTQVTLRCHIDGHPRPTYQWFRDGTPLSDGQSNHTVSSKERNLTLRPAGPEHSGLYSCCAHSAFGQACSSQNFTLSIADESFARVVLAPQDVVVARYEEAMFHCQFSAQPPPSLQWLFEDETPITNRSRPPHLRRATVFANGSLLLTQVRPRNAGIYRCIGQGQRGPPIILEATLHLAEIEDMPLFEPRVFTAGSEERVTCLPPKGLPEPSVWWEHAGVRLPTHGRVYQKGHELVLANIAESDAGVYTCHAANLAGQRRQDVNITVATVPSWLKKPQDSQLEEGKPGYLDCLTQATPKPTVVWYRNQMLISEDSRFEVFKNGTLRINSVEVYDGTWYRCMSSTPAGSIEAQARVQVLEKLKFTPPPQPQQCMEFDKEATVPCSATGREKPTIKWERADGSSLPEWVTDNAGTLHFARVTRDDAGNYTCIASNGPQGQIRAHVQLTVAVFITFKVEPERTTVYQGHTALLQCEAQGDPKPLIQWKDKPVPEESEGPGSPPPYKMIQTIGLSVGAAVAYIIAVLGLMFYCKKRCKAKRLQKQPEGEEPEMECLNGGPLQNGQPSAEIQEEVALTSLGSGPAATNKRHSTSDKMHFPRSSLQPITTLGKSEFGEVFLAKAQGLEEGVAETLVLVKSLQSKDEQQQLDFRRELEMFGKLNHANVVRLLGLCREAEPHYMVLEYVDLGDLKQFLRISKSKDEKLKSQPLSTKQKVALCTQVALGMEHLSNNRFVHKDLAARNCLVSAQRQVKVSALGLSKDVYNSEYYHFRQAWVPLRWMSPEAILEGDFSTKSDVWAFGVLMWEVFTHGEMPHGGQADDEVLADLQAGKARLPQPEGCPSKLYRLMQRCWALSPKDRPSFSEIASALGDSTVDSKP

SEQ ID NO: 1150 - protein, 1070 aa, Homo sapiens
MGAARGSPARPRRLPLLSVLLLPLLGGTQTAIVFIKQPSSQDALQGRRALLRCEVEAPGPVHVYWLLDGAPVQDTERRFAQGSSLSFAAVDRLQDSGTFQCVARDDVTGEEARSANASFNIKWIEAGPVVLKHPASEAEIQPQTQVTLRCHIDGHPRPTYQWFRDGTPLSDGQSNHTVSSKERNLTLRPAGPEHSGLYSCCAHSAFGQACSSQNFTLSIADESFARVVLAPQDVVVARYEEAMFHCQFSAQPPPSLQWLFEDETPITNRSRPPHLRRATVFANGSLLLTQVRPRNAGIYRCIGQGQRGPPIILEATLHLAEIEDMPLFEPRVFTAGSEERVTCLPPKGLPEPSVWWEHAGVRLPTHGRVYQKGHELVLANIAESDAGVYTCHAANLAGQRRQDVNITVATVPSWLKKPQDSQLEEGKPGYLDCLTQATPKPTVVWYRNQMLISEDSRFEVFKNGTLRINSVEVYDGTWYRCMSSTPAGSIEAQARVQVLEKLKFTPPPQPQQCMEFDKEATVPCSATGREKPTIKWERADGSSLPEWVTDNAGTLHFARVTRDDAGNYTCIASNGPQGQIRAHVQLTVAVFITFKVEPERTTVYQGHTALLQCEAQGDPKPLIQWKGKDRILDPTKLGPRMHIFQNGSLVIHDVAPEDSGRYTCIAGNSCNIKHTEAPLYVVDKPVPEESEGPGSPPPYKMIQTIGLSVGAAVAYIIAVLGLMFYCKKRCKAKRLQKQPEGEEPEMECLNGGPLQNGQPSAEIQEEVALTSLGSGPAATNKRHSTSDKMHFPRSSLQPITTLGKSEFGEVFLAKAQGLEEGVAETLVLVKSLQSKDEQQQLDFRRELEMFGKLNHANVVRLLGLCREAEPHYMVLEYVDLGDLKQFLRISKSKDEKLKSQPLSTKQKVALCTQVALGMEHLSNNRFVHKDLAARNCLVSAQRQVKVSALGLSKDVYNSEYYHFRQAWVPLRWMSPEAILEGDFSTKSDVWAFGVLMWEVFTHGEMPHGGQADDEVLADLQAGKARLPQPEGCPSKLYRLMQRCWALSPKDRPSFSEIASALGDSTVDSKP

SEQ ID NO: 1151 - protein, 733 aa, Homo sapiens
MGAARGSPARPRRLPLLSVLLLPLLGGTQTAIVFIKQPSSQDALQGRRALLRCEVEAPGPVHVYWLLDGAPVQDTERRFAQGSSLSFAAVDRLQDSGTFQCVARDDVTGEEARSANASFNIKWIEAGPVVLKHPASEAEIQPQTQVTLRCHIDGHPRPTYQWFRDGTPLSDGQSNHTVSSKERNLTLRPAGPEHSGLYSCCAHSAFGQACSSQNFTLSIADESFARVVLAPQDVVVARYEEAMFHCQFSAQPPPSLQWLFEDETPITNRSRPPHLRRATVFANGSLLLTQVRPRNAGIYRCIGQGQRGPPIILEATLHLAEIEDMPLFEPRVFTAGSEERVTCLPPKGLPEPSVWWEHAGVRLPTHGRVYQKGHELVLANIAESDAGVYTCHAANLAGQRRQDVNITVATVPSWLKKPQDSQLEEGKPGYLDCLTQATPKPTVVWYRNQMLISEDSRFEVFKNGTLRINSVEVYDGTWYRCMSSTPAGSIEAQARVQVLEKLKFTPPPQPQQCMEFDKEATVPCSATGREKPTIKWERADGSSLPEWVTDNAGTLHFARVTRDDAGNYTCIASNGPQGQIRAHVQLTVAVFITFKVEPERTTVYQGHTALLQCEAQGDPKPLIQWKGKDRILDPTKLGPRMHIFQNGSLVIHDVAPEDSGRYTCIAGNSCNIKHTEAPLYVVGMGWGGLCCTGSGGPRRLSPCTQPLCTEHGTEAIFVAAVGIRPSHHAAAQS

SEQ ID NO: 1152 - protein, 644 aa, Homo sapiens
MGAARGSPARPRRLPLLSVLLLPLLGGTQTAIVFIKQPSSQDALQGRRALLRCEVEAPGPVHVYWLLDGAPVQDTERRFAQGSSLSFAAVDRLQDSGTFQCVARDDVTGEEARSANASFNIKWIEAGPVVLKHPASEAEIQPQTQVTLRCHIDGHPRPTYQWFRDGTPLSDGQSNHTVSSKERNLTLRPAGPEHSGLYSCCAHSAFGQACSSQNFTLSIADESFARVVLAPQDVVVARYEEAMFHCQFSAQPPPSLQWLFEDETPITNRSRPPHLRRATVFANGSLLLTQVRPRNAGIYRCIGQGQRGPPIILEATLHLAEIEDMPLFEPRVFTAGSEERVTCLPPKGLPEPSVWWEHAGVRLPTHGRVYQKGHELVLANIAESDAGVYTCHAANLAGQRRQDVNITVATVPSWLKKPQDSQLEEGKPGYLDCLTQATPKPTVVWYRNQMLISEDSRFEVFKNGTLRINSVEVYDGTWYRCMSSTPAGSIEAQARVQVLEKLKFTPPPQPQQCMEFDKEATVPCSATGREKPTIKWERADGSSLPEWVTDNAGTLHFARVTRDDAGNYTCIASNGPQGQIRAHVQLTVAVFITFKVEPERTTVYQGHTALLQCEAQGDPKPLIQWKGKDRILDPTKLGPRMAPW

SEQ ID NO: 1153 - protein, 459 aa, Homo sapiens
MGAARGSPARPRRLPLLSVLLLPLLGGTQTAIVFIKQPSSQDALQGRRALLRCEVEAPGPVHVYWLLDGAPVQDTERRFAQGSSLSFAAVDRLQDSGTFQCVARDDVTGEEARSANASFNIKWIEAGPVVLKHPASEAEIQPQTQVTLRCHIDGHPRPTYQWFRDGTPLSDGQSNHTVSSKERNLTLRPAGPEHSGLYSCCAHSAFGQACSSQNFTLSIADESFARVVLAPQDVVVARYEEAMFHCQFSAQPPPSLQWLFEDETPITNRSRPPHLRRATVFANGSLLLTQVRPRNAGIYRCIGQGQRGPPIILEATLHLAEIEDMPLFEPRVFTAGSEERVTCLPPKGLPEPSVWWEHAGVRLPTHGRVYQKGHELVLANIAESDAGVYTCHAANLAGQRRQDVNITVASEHLCPEGQGEVEGNTGLGVMDRGFPGTHLRSSQFWALQAWESVHYWESV

SEQ ID NO: 1154 - protein, 139 aa, Homo sapiens
MGAARGSPARPRRLPLLSVLLLPLLGGTQTAIVFIKQPSSQDALQGRRALLRCEVEAPGPVHVYWLLDGAPVQDTERRFAQGSSLSFAAVDRLQDSGTFQCVARDDVTGEEARSANASFNIKCESQGGCAQSPCQTLND

SEQ ID NO: 1155 - protein, 157 aa, Homo sapiens
MGAARGSPARPRRLPLLSVLLLPLLGGTQTAIVFIKQPSSQDALQGRRALLRCEVEAPGPVHVYWLLDGAPVQDTERRFAQGSSLSFAAVDRLQDSGTFQCVARDDVTGEEARSANASFNIKWIEAGPVVLKHPASEAEIQPQTQVTLRCHIDGHPR

SEQ ID NO: 1156 - protein, 231 aa, Homo sapiens
MGAARGSPARPRRLPLLSVLLLPLLGGTQTAIVFIKQPSSQDALQGRRALLRCEVEAPGPVHVYWLLDGAPVQDTERRFAQGSSLSFAAVDRLQDSGTFQCVARDDVTGEEARSANASFNIKWIEAGPVVLKHPASEAEIQPQTQVTLRCHIDGHPRPTYQWFRDGTPLSDGQSNHTVSSKERNLTLRPAGPEHSGLYSCCAHSAFGQACSSQNFTLSIAGEPGVGAEGMR

SEQ ID NO: 1157 - DNA, 3001 bp, Homo sapiens
ggagtttattcataacgcgctctccaagtatacgtggcaatgcgttgctgggttattttaatcattctaggcatcgttttcctccttatgcctctatcattcctccctatctacactaacatcccacgctctgaacgcgcgcccattaatacccttctttcctccactctccctgggactcttgatcaaagcgcggccctttccccagccttagcgaggcgccctgcagcctggtacgcgcgtggcgtggcggtgggcgcgcagtgcgttctcggtgtggagggcagctgttccgcctgcgatgatttatactcacaggacaaggatgcggtttgtcaaacagtactgctacggaggagcagcagagaaagggagagggtttgagagggagcaaaagaaaatggtaggcgcgcgtagttaattcatgcggctctcttactctgtttacatcctagagctagagtgctcggctgcccggctgagtctcctccccaccttccccaccctccccaccctccccataagcgcccctcccgggttcccaaagcagagggcgtgggggaaaagaaaaaagatcctctctcgctaatctccgcccaccggccctttataatgcgagggtctggacggctgaggacccccgagctgtgctgctcgcggccgccaccgccgggccccggccgtccctggctcccctcctgcctcgagaagggcagggcttctcagaggcttggcgggaaaaagaacggagggagggatcgcgctgagtataaaagccggttttcggggctttatctaactcgctgtagtaattccagcgagaggcagagggagcgagcgggcggccggctagggtggaagagccgggcgagcagagctgcgctgcgggcgtcctgggaagggagatccggagcgaatagggggcttcgcctctggcccagccctcccgctgatcccccagccagcggtccgcaacccttgccgcatccacgaaactttgcccatagcagcgggcgggcactttgcactggaacttacaacacccgagcaaggacgcgactctcccgacgcggggaggctattctgcccatttggggacacttccccgccgctgccaggacccgcttctctgaaaggctctccttgcagctgcttagacgctggatttttttcgggtagtggaaaaccagcagcctcccgcgacgatgcccctcaacgttagcttcaccaacaggaactatgacctcgactacgactcggtgcagccgtatttctactgcgacgaggaggagaacttctaccagcagcagcagcagagcgagctgcagcccccggcgcccagcgaggatatctggaagaaattcgagctgctgcccaccccgcccctgtcccctagccgccgctccgggctctgctcgccctcctacgttgcggtcacacccttctcccttcggggagacaacgacggcggtggcgggagcttctccacggccgaccagctggagatggtgaccgagctgctgggaggagacatggtgaaccagagtttcatctgcgacccggacgacgagaccttcatcaaaaacatcatcatccaggactgtatgtggagcggcttctcggccgccgccaagctcgtctcagagaagctggcctcctaccaggctgcgcgcaaagacagcggcagcccgaaccccgcccgcggccacagcgtctgctccacctccagcttgtacctgcaggatctgagcgccgccgcctcagagtgcatcgacccctcggtggtcttcccctaccctctcaacgacagcagctcgcccaagtcctgcgcctcgcaagactccagcgccttctctccgtcctcggattctctgctctcctcgacggagtcctccccgcagggcagccccgagcccctggtgctccatgaggagacaccgcccaccaccagcagcgactctgaggaggaacaagaagatgaggaagaaatcgatgttgtttctgtggaaaagaggcaggctcctggcaaaaggtcagagtctggatcaccttctgctggaggccacagcaaacctcctcacagcccactggtcctcaagaggtgccacgtctccacacatcagcacaactacgcagcgcctccctccactcggaaggactatcctgctgccaagagggtcaagttggacagtgtcagagtcctgagacagatcagcaacaaccgaaaatgcaccagccccaggtcctcggacaccgaggagaatgtcaagaggcgaacacacaacgtcttggagcgccagaggaggaacgagctaaaacggagcttttttgccctgcgtgaccagatcccggagttggaaaacaatgaaaaggcccccaaggtagttatccttaaaaaagccacagcatacatcctgtccgtccaagcagaggagcaaaagctcatttctgaagaggacttgttgcggaaacgacgagaacagttgaaacacaaacttgaacagctacggaactcttgtgcgtaaggaaaagtaaggaaaacgattccttctaacagaaatgtcctgagcaatcacctatgaacttgtttcaaatgcatgatcaaatgcaacctcacaaccttggctgagtcttgagactgaaagatttagccataatgtaaactgcctcaaattggactttgggcataaaagaacttttttatgcttaccatcttttttttttctttaacagatttgtatttaagaattgtttttaaaaaattttaagatttacacaatgtttctctgtaaatattgccattaaatgtaaataactttaataaaacgtttatagcagttacacagaatttcaatcctagtatatagtacctagtattataggtactataaaccctaattttttttatttaagtacattttgctttttaaagttgatttttttctattgtttttagaaaaaataaaataactggcaaatatatcattgagccaaatcttaa

SEQ ID NO: 1158 - DNA, 4625 bp, Homo sapiens
ggagtttattcataacgcgctctccaagtatacgtggcaatgcgttgctgggttattttaatcattctaggcatcgttttcctccttatgcctctatcattcctccctatctacactaacatcccacgctctgaacgcgcgcccattaatacccttctttcctccactctccctgggactcttgatcaaagcgcggccctttccccagccttagcgaggcgccctgcagcctggtacgcgcgtggcgtggcggtgggcgcgcagtgcgttctcggtgtggagggcagctgttccgcctgcgatgatttatactcacaggacaaggatgcggtttgtcaaacagtactgctacggaggagcagcagagaaagggagagggtttgagagggagcaaaagaaaatggtaggcgcgcgtagttaattcatgcggctctcttactctgtttacatcctagagctagagtgctcggctgcccggctgagtctcctccccaccttccccaccctccccaccctccccataagcgcccctcccgggttcccaaagcagagggcgtgggggaaaagaaaaaagatcctctctcgctaatctccgcccaccggccctttataatgcgagggtctggacggctgaggacccccgagctgtgctgctcgcggccgccaccgccgggccccggccgtccctggctcccctcctgcctcgagaagggcagggcttctcagaggcttggcgggaaaaagaacggagggagggatcgcgctgagtataaaagccggttttcggggctttatctaactcgctgtagtaattccagcgagaggcagagggagcgagcgggcggccggctagggtggaagagccgggcgagcagagctgcgctgcgggcgtcctgggaagggagatccggagcgaatagggggcttcgcctctggcccagccctcccgctgatcccccagccagcggtccgcaacccttgccgcatccacgaaactttgcccatagcagcgggcgggcactttgcactggaacttacaacacccgagcaaggacgcgactctcccgacgcggggaggctattctgcccatttggggacacttccccgccgctgccaggacccgcttctctgaaaggctctccttgcagctgcttagacgctggatttttttcgggtagtggaaaaccaggtaagcaccgaagtccacttgccttttaatttatttttttatcactttaatgctgagatgagtcgaatgcctaaatagggtgtcttttctcccattcctgcgctattgacacttttctcagagtagttatggtaactggggctggggtggggggtaatccagaactggatcggggtaaagtgacttgtcaagatgggagaggagaaggcagagggaaaacgggaatggtttttaagactaccctttcgagatttctgccttatgaatatattcacgctgactcccggccggtcggacattcctgctttattgtgttaattgctctctgggttttggggggctgggggttgctttgcggtgggcagaaagccccttgcatcctgagctccttggagtagggaccgcatatcgcctgtgtgagccagatcgctccgcagccgctgacttgtccccgtctccgggagggcatttaaatttcggctcaccgcatttctgacagccggagacggacactgcggcgcgtcccgcccgcctgtccccgcggcgattccaacccgccctgatccttttaagaagttggcatttggctttttaaaaagcaataatacaatttaaaacctgggtctctagaggtgttaggacgtggtgttgggtaggcgcaggcaggggaaaagggaggcgaggatgtgtccgattctcctggaatcgttgacttggaaaaaccagggcgaatctccgcacccagccctgactcccctgccgcggccgccctcgggtgtcctcgcgcccgagatgcggaggaactgcgaggagcggggctctgggcggttccagaacagctgctacccttggtggggtggctccgggggaggtatcgcagcggggtctctggcgcagttgcatctccgtattgagtgcgaagggaggtgcccctattattatttgacaccccccttgtatttatggaggggtgttaaagcccgcggctgagctcgccactccagccggcgagagaaagaagaaaagctggcaaaaggagtgttggacgggggcggtactgggggtggggacgggggcggtggagagggaaggttgggaggggctgcggtgccggcgggggtaggagagcggctagggcgcgagtgggaacagccgcagcggaggggccccggcgcggagcggggttcacgcagccgctagcgcccaggcgcctctcgccttctccttcaggtggcgcaaaactttgtgccttggattttgtcaaattgttttcctcaccgccacctcccgcggcttcttaagggcgccagggccgatttcgattcctctgccgctgcggggccgactcccgggctttgcgctccgggctcccgggggagcgggggctcggcgggcaccaagccgctggttcactaagtgcgtctccgagatagcaggggactgtccaaagggggtgaaagggtgctccctttattcccccaccaagaccacccagccgctttaggggatagctctgcaaggggagaggttcgggactgtggcgcgcactgcgcgctgcgccaggtttccgcaccaagacccctttaactcaagactgcctcccgctttgtgtgccccgctccagcagcctcccgcgacgatgcccctcaacgttagcttcaccaacaggaactatgacctcgactacgactcggtgcagccgtatttctactgcgacgaggaggagaacttctaccagcagcagcagcagagcgagctgcagcccccggcgcccagcgaggatatctggaagaaattcgagctgctgcccaccccgcccctgtcccctagccgccgctccgggctctgctcgccctcctacgttgcggtcacacccttctcccttcggggagacaacgacggcggtggcgggagcttctccacggccgaccagctggagatggtgaccgagctgctgggaggagacatggtgaaccagagtttcatctgcgacccggacgacgagaccttcatcaaaaacatcatcatccaggactgtatgtggagcggcttctcggccgccgccaagctcgtctcagagaagctggcctcctaccaggctgcgcgcaaagacagcggcagcccgaaccccgcccgcggccacagcgtctgctccacctccagcttgtacctgcaggatctgagcgccgccgcctcagagtgcatcgacccctcggtggtcttcccctaccctctcaacgacagcagctcgcccaagtcctgcgcctcgcaagactccagcgccttctctccgtcctcggattctctgctctcctcgacggagtcctccccgcagggcagccccgagcccctggtgctccatgaggagacaccgcccaccaccagcagcgactctgaggaggaacaagaagatgaggaagaaatcgatgttgtttctgtggaaaagaggcaggctcctggcaaaaggtcagagtctggatcaccttctgctggaggccacagcaaacctcctcacagcccactggtcctcaagaggtgccacgtctccacacatcagcacaactacgcagcgcctccctccactcggaaggactatcctgctgccaagagggtcaagttggacagtgtcagagtcctgagacagatcagcaacaaccgaaaatgcaccagccccaggtcctcggacaccgaggagaatgtcaagaggcgaacacacaacgtcttggagcgccagaggaggaacgagctaaaacggagcttttttgccctgcgtgaccagatcccggagttggaaaacaatgaaaaggcccccaaggtagttatccttaaaaaagccacagcatacatcctgtccgtccaagcagaggagcaaaagctcatttctgaagaggacttgttgcggaaacgacgagaacagttgaaacacaaacttgaacagctacggaactcttgtgcgtaaggaaaagtaaggaaaacgattccttctaacagaaatgtcctgagcaatcacctatgaacttgtttcaaatgcatgatcaaatgcaacctcacaaccttggctgagtcttgagactgaaagatttagccataatgtaaactgcctcaaattggactttgggcataaaagaacttttttatgcttaccatcttttttttttctttaacagatttgtatttaagaattgtttttaaaaaattttaagatttacacaatgtttctctgtaaatattgccattaaatgtaaataactttaataaaacgtttatagcagttacacagaatttcaatcctagtatatagtacctagtattataggtactataaaccctaattttttttatttaagtacattttgctttttaaagttgatttttttctattgtttttagaaaaaataaaataactggcaaatatatcattgagccaaatcttaa

SEQ ID NO: 1159 - DNA, 2841 bp, Homo sapiens
ggagtttattcataacgcgctctccaagtatacgtggcaatgcgttgctgggttattttaatcattctaggcatcgttttcctccttatgcctctatcattcctccctatctacactaacatcccacgctctgaacgcgcgcccattaatacccttctttcctccactctccctgggactcttgatcaaagcgcggccctttccccagccttagcgaggcgccctgcagcctggtacgcgcgtggcgtggcggtgggcgcgcagtgcgttctcggtgtggagggcagctgttccgcctgcgatgatttatactcacaggacaaggatgcggtttgtcaaacagtactgctacggaggagcagcagagaaagggagagggtttgagagggagcaaaagaaaatggtaggcgcgcgtagttaattcatgcggctctcttactctgtttacatcctagagctagagtgctcggctgcccggctgagtctcctccccaccttccccaccctccccaccctccccataagcgcccctcccgggttcccaaagcagagggcgtgggggaaaagaaaaaagatcctctctcgctaatctccgcccaccggccctttataatgcgagggtctggacggctgaggacccccgagctgtgctgctcgcggccgccaccgccgggccccggccgtccctggctcccctcctgcctcgagaagggcagggcttctcagaggcttggcgggaaaaagaacggagggagggatcgcgctgagtataaaagccggttttcggggctttatctaactcgctgtagtaattccagcgagaggcagagggagcgagcgggcggccggctagggtggaagagccgggcgagcagagctgcgctgcgggcgtcctgggaagggagatccggagcgaatagggggcttcgcctctggcccagccctcccgctgatcccccagccagcggtccgcaacccttgccgcatccacgaaactttgcccatagcagcgggcgggcactttgcactggaacttacaacacccgagcaaggacgcgactctcccgacgcggggaggctattctgcccatttggggacacttccccgccgctgccaggacccgcttctctgaaaggctctccttgcagctgcttagacgctggatttttttcgggtagtggaaaaccagcagcctcccgcgacgatgcccctcaacgttagcttcaccaacaggaactatgacctcgactacgactcggtgcagccgtatttctactgcgacgaggaggagaacttctaccagcagcagcagcagagcgagctgcagcccccggcgcccagcgaggatatctggaagaaattcgagctgctgcccaccccgcccctgtcccctagccgccgctccgggctctgctcgccctcctacgttgcggtcacacccttctcccttcggggagacaacgacggcggtggcgggagcttctccacggccgaccagctggagatggtgaccgagctgctgggaggagacatggtgaaccagagtttcatctgcgacccggacgacgagaccttcatcaaaaacatcatcatccaggactgtatgtggagcggcttctcggccgccgccaagctcgtctcagagaagctggcctcctaccaggctgcgcgcaaagacagcggcagcccgaaccccgcccgcggccacagcgtctgctccacctccagcttgtacctgcaggatctgagcgccgccgcctcagagtgcatcgacccctcggtggtcttcccctaccctctcaacgacagcagctcgcccaagtcctgcgcctcgcaagactccagcgccttctctccgtcctcggattctctgctctcctcgacggagtcctccccgcagggcagccccgagcccctggtgctccatgaggagacaccgcccaccaccagcagcgactctgaggaggaacaagaagatgaggaagaaatcgatgttgtttctgtggaaaagaggcaggctcctggcaaaaggtcagagtctggatcaccttctgctggaggccacagcaaacctcctcacagcccactggtcctcaagaggtgccacgtctccacacatcagcacaactacgcagcgcctccctccactcggaaggactatcctgctgccaagagggtcaagttggacagtgtcagagtcctgagacagatcagcaacaaccgaaaatgcaccagccccaggtcctcggacaccgaggagaatgtcaagaggcgaacacacaacgtcttggagcgccagaggaggaacgagctaaaacggagcttttttgccctgcgtgaccagatcccggagttggaaaacaatgaaaaggcccccaaggtagttatccttaaaaaagccacagcatacatcctgtccgtccaagcagaggagcaaaagctcatttctgaagaggacttgttgcggaaacgacgagaacagttgaaacacaaacttgaacagctacggaactcttgtgcgtaaggaaaagtaaggaaaacgattccttctaacagaaatgtcctgagcaatcacctatgaacttgtttcaaatgcatgatcaaatgcaacctcacaaccttggctgagtcttgagactgaaagatttagccataatgtaaactgcctcaaattggactttgggcataaaagaacttttttatgcttaccatcttttttttttctttaacagatttgtatttaagaattgtttttaaaaaattttaagatttacacaatgtttctctgtaaatattgccattaaatgtaaataactttaataaaacgtttatagcagtta

SEQ ID NO: 1160 - DNA, 4539 bp, Homo sapiens
ggagtttattcataacgcgctctccaagtatacgtggcaatgcgttgctgggttattttaatcattctaggcatcgttttcctccttatgcctctatcattcctccctatctacactaacatcccacgctctgaacgcgcgcccattaatacccttctttcctccactctccctgggactcttgatcaaagcgcggccctttccccagccttagcgaggcgccctgcagcctggtacgcgcgtggcgtggcggtgggcgcgcagtgcgttctcggtgtggagggcagctgttccgcctgcgatgatttatactcacaggacaaggatgcggtttgtcaaacagtactgctacggaggagcagcagagaaagggagagggtttgagagggagcaaaagaaaatggtaggcgcgcgtagttaattcatgcggctctcttactctgtttacatcctagagctagagtgctcggctgcccggctgagtctcctccccaccttccccaccctccccaccctccccataagcgcccctcccgggttcccaaagcagagggcgtgggggaaaagaaaaaagatcctctctcgctaatctccgcccaccggccctttataatgcgagggtctggacggctgaggacccccgagctgtgctgctcgcggccgccaccgccgggccccggccgtccctggctcccctcctgcctcgagaagggcagggcttctcagaggcttggcgggaaaaagaacggagggagggatcgcgctagggtggaagagccgggcgagcagagctgcgctgcgggcgtcctgggaagggagatccggagcgaatagggggcttcgcctctggcccagccctcccgctgatcccccagccagcggtccgcaacccttgccgcatccacgaaactttgcccatagcagcgggcgggcactttgcactggaacttacaacacccgagcaaggacgcgactctcccgacgcggggaggctattctgcccatttggggacacttccccgccgctgccaggacccgcttctctgaaaggctctccttgcagctgcttagacgctggatttttttcgggtagtggaaaaccaggtaagcaccgaagtccacttgccttttaatttatttttttatcactttaatgctgagatgagtcgaatgcctaaatagggtgtcttttctcccattcctgcgctattgacacttttctcagagtagttatggtaactggggctggggtggggggtaatccagaactggatcggggtaaagtgacttgtcaagatgggagaggagaaggcagagggaaaacgggaatggtttttaagactaccctttcgagatttctgccttatgaatatattcacgctgactcccggccggtcggacattcctgctttattgtgttaattgctctctgggttttggggggctgggggttgctttgcggtgggcagaaagccccttgcatcctgagctccttggagtagggaccgcatatcgcctgtgtgagccagatcgctccgcagccgctgacttgtccccgtctccgggagggcatttaaatttcggctcaccgcatttctgacagccggagacggacactgcggcgcgtcccgcccgcctgtccccgcggcgattccaacccgccctgatccttttaagaagttggcatttggctttttaaaaagcaataatacaatttaaaacctgggtctctagaggtgttaggacgtggtgttgggtaggcgcaggcaggggaaaagggaggcgaggatgtgtccgattctcctggaatcgttgacttggaaaaaccagggcgaatctccgcacccagccctgactcccctgccgcggccgccctcgggtgtcctcgcgcccgagatgcggaggaactgcgaggagcggggctctgggcggttccagaacagctgctacccttggtggggtggctccgggggaggtatcgcagcggggtctctggcgcagttgcatctccgtattgagtgcgaagggaggtgcccctattattatttgacaccccccttgtatttatggaggggtgttaaagcccgcggctgagctcgccactccagccggcgagagaaagaagaaaagctggcaaaaggagtgttggacgggggcggtactgggggtggggacgggggcggtggagagggaaggttgggaggggctgcggtgccggcgggggtaggagagcggctagggcgcgagtgggaacagccgcagcggaggggccccggcgcggagcggggttcacgcagccgctagcgcccaggcgcctctcgccttctccttcaggtggcgcaaaactttgtgccttggattttgtcaaattgttttcctcaccgccacctcccgcggcttcttaagggcgccagggccgatttcgattcctctgccgctgcggggccgactcccgggctttgcgctccgggctcccgggggagcgggggctcggcgggcaccaagccgctggttcactaagtgcgtctccgagatagcaggggactgtccaaagggggtgaaagggtgctccctttattcccccaccaagaccacccagccgctttaggggatagctctgcaaggggagaggttcgggactgtggcgcgcactgcgcgctgcgccaggtttccgcaccaagacccctttaactcaagactgcctcccgctttgtgtgccccgctccagcagcctcccgcgacgatgcccctcaacgttagcttcaccaacaggaactatgacctcgactacgactcggtgcagccgtatttctactgcgacgaggaggagaacttctaccagcagcagcagcagagcgagctgcagcccccggcgcccagcgaggatatctggaagaaattcgagctgctgcccaccccgcccctgtcccctagccgccgctccgggctctgctcgccctcctacgttgcggtcacacccttctcccttcggggagacaacgacggcggtggcgggagcttctccacggccgaccagctggagatggtgaccgagctgctgggaggagacatggtgaaccagagtttcatctgcgacccggacgacgagaccttcatcaaaaacatcatcatccaggactgtatgtggagcggcttctcggccgccgccaagctcgtctcagagaagctggcctcctaccaggctgcgcgcaaagacagcggcagcccgaaccccgcccgcggccacagcgtctgctccacctccagcttgtacctgcaggatctgagcgccgccgcctcagagtgcatcgacccctcggtggtcttcccctaccctctcaacgacagcagctcgcccaagtcctgcgcctcgcaagactccagcgccttctctccgtcctcggattctctgctctcctcgacggagtcctccccgcagggcagccccgagcccctggtgctccatgaggagacaccgcccaccaccagcagcgactctgaggaggaacaagaagatgaggaagaaatcgatgttgtttctgtggaaaagaggcaggctcctggcaaaaggtcagagtctggatcaccttctgctggaggccacagcaaacctcctcacagcccactggtcctcaagaggtgccacgtctccacacatcagcacaactacgcagcgcctccctccactcggaaggactatcctgctgccaagagggtcaagttggacagtgtcagagtcctgagacagatcagcaacaaccgaaaatgcaccagccccaggtcctcggacaccgaggagaatgtcaagaggcgaacacacaacgtcttggagcgccagaggaggaacgagctaaaacggagcttttttgccctgcgtgaccagatcccggagttggaaaacaatgaaaaggcccccaaggtagttatccttaaaaaagccacagcatacatcctgtccgtccaagcagaggagcaaaagctcatttctgaagaggacttgttgcggaaacgacgagaacagttgaaacacaaacttgaacagctacggaactcttgtgcgtaaggaaaagtaaggaaaacgattccttctaacagaaatgtcctgagcaatcacctatgaacttgtttcaaatgcatgatcaaatgcaacctcacaaccttggctgagtcttgagactgaaagatttagccataatgtaaactgcctcaaattggactttgggcataaaagaacttttttatgcttaccatcttttttttttctttaacagatttgtatttaagaattgtttttaaaaaattttaagatttacacaatgtttctctgtaaatattgccattaaatgtaaataactttaataaaacgtttatagcagttacacagaatttcaatcctagtatatagtacctagtattataggtactataaaccctaattttttttatttaagtacattttgctttttaaagttgatttttttctattgtttttagaaaaaataaaataactggcaaatatatcattgagccaaatcttaa

SEQ ID NO: 1161 - DNA, 4377 bp, Homo sapiens
ggagtttattcataacgcgctctccaagtatacgtggcaatgcgttgctgggttattttaatcattctaggcatcgttttcctccttatgcctctatcattcctccctatctacactaacatcccacgctctgaacgcgcgcccattaatacccttctttcctccactctccctgggactcttgatcaaagcgcggccctttccccagccttagcgaggcgccctgcagcctggtacgcgcgtggcgtggcggtgggcgcgcagtgcgttctcggtgtggagggcagctgttccgcctgcgatgatttatactcacaggacaaggatgcggtttgtcaaacagtactgctacggaggagcagcagagaaagggagagggtttgagagggagcaaaagaaaatggtaggcgcgcgtagttaattcatgcggctctcttactctgtttacatcctagagctagagtgctcggctgcccggctgagtctcctccccaccttccccaccctccccaccctccccataagcgcccctcccgggttcccaaagcagagggcgtgggggaaaagaaaaaagatcctctctcgctaatctccgcccaccggccctttataatgcgagggtctggacggctgaggacccccgagctgtgctgctcgcggccgccaccgccgggccccggccgtccctggctcccctcctgcctcgagaagggcagggcttctcagaggcttggcgggaaaaagaacggagggagggatcgcgctgagtataaaagccggttttcggggctttatctaactcgctgtagtaattccagcgagaggcagagggagcgagcgggcggccggctagggtggaagagccgggcgagcagagctgcgctgcgggcgtcctgggaagggagatccggagcgaatagggggcttcgcctctggcccagccctcccgctgatcccccagccagcggtccgcaacccttgccgcatccacgaaactttgcccatagcagcgggcgggcactttgcactggaacttacaacacccgagcaaggacgcgactctcccgacgcggggaggctattctgcccatttggggacacttccccgccgctgccaggacccgcttctctgaaaggctctccttgcagctgcttagacgctggatttttttcgggtagtggaaaaccagcagcctcccgcgacgatgcccctcaacgttagcttcaccaacaggaactatgacctcgactacgactcggtgcagccgtatttctactgcgacgaggaggagaacttctaccagcagcagcagcagagcgagctgcagcccccggcgcccagcgaggatatctggaagaaattcgagctgctgcccaccccgcccctgtcccctagccgccgctccgggctctgctcgccctcctacgttgcggtcacacccttctcccttcggggagacaacgacggcggtggcgggagcttctccacggccgaccagctggagatggtgaccgagctgctgggaggagacatggtgaaccagagtttcatctgcgacccggacgacgagaccttcatcaaaaacatcatcatccaggactgtatgtggagcggcttctcggccgccgccaagctcgtctcagagaagctggcctcctaccaggctgcgcgcaaagacagcggcagcccgaaccccgcccgcggccacagcgtctgctccacctccagcttgtacctgcaggatctgagcgccgccgcctcagagtgcatcgacccctcggtggtcttcccctaccctctcaacgacagcagctcgcccaagtcctgcgcctcgcaagactccagcgccttctctccgtcctcggattctctgctctcctcgacggagtcctccccgcagggcagccccgagcccctggtgctccatgaggagacaccgcccaccaccagcagcgactctggtaagcgaagcccgcccaggcctgtcaaaagtgggcggctggatacctttcccattttcattggcagcttatttaacgggccactcttattaggaaggagagatagcagatctggagagatttgggagctcatcacctctgaaaccttgggctttagcgtttcctcccatcccttccccttagactgcccatgtttgcagcccccctccccgtttgtctcccacccctcaggaatttcatttaggtttttaaaccttctggcttatcttacaactcaatccacttcttcttacctcccgttaacattttaattgccctggggcggggtggcagggagtgtatgaatgaggataagagaggattgatctctgagagtgaatgaattgcttccctcttaacttccgagaagtggtgggatttaatgaactatctacaaaaatgaggggctgtgtttagaggctaggcagggcctgcctgagtgcgggagccagtgaactgcctcaagagtgggtgggctgaggagctgggatcttctcagcctattttgaacactgaaaagcaaatccttgccaaagttggacttttttttttcttttattccttcccccgccctcttggacttttggcaaaactgcaatttttttttttttatttttcatttccagtaaaatagggagttgctaaagtcataccaagcaatttgcagctatcatttgcaacacctgaagtgttcttggtaaagtccctcaaaaataggaggtgcttgggaatgtgctttgctttgggtgtgtccaaagcctcattaagtcttaggtaagaattggcatcaatgtcctatcctgggaagttgcacttttcttgtccatgccataacccagctgtctttccctttatgagactcttaccttcatggtgagaggagtaagggtggctggctagattggttcttttttttttttttcccttttttaagacggagtctcactctgtcactaggctggagtgcagtggcgcaatcaacctccaaccccctggttcaagagattctcctgcctcagcctcccaagtagctgggactacaggtgcacaccaccatgccaggctaatttttgtaattttagtagagatggggtttcatcgtgttggccaggatggtctctcctgacctcacgatccgcccacctcggcctcccaaagtgctgggattacaggtgtgagccagggcaccaggcttagatgtggctctttggggagataattttgtccagagacctttctaacgtattcatgccttgtatttgtacagcattaatctggtaattgattattttaatgtaaccttgctaaaggagtgatttctatttcctttcttaaagaggaggaacaagaagatgaggaagaaatcgatgttgtttctgtggaaaagaggcaggctcctggcaaaaggtcagagtctggatcaccttctgctggaggccacagcaaacctcctcacagcccactggtcctcaagaggtgccacgtctccacacatcagcacaactacgcagcgcctccctccactcggaaggactatcctgctgccaagagggtcaagttggacagtgtcagagtcctgagacagatcagcaacaaccgaaaatgcaccagccccaggtcctcggacaccgaggagaatgtcaagaggcgaacacacaacgtcttggagcgccagaggaggaacgagctaaaacggagcttttttgccctgcgtgaccagatcccggagttggaaaacaatgaaaaggcccccaaggtagttatccttaaaaaagccacagcatacatcctgtccgtccaagcagaggagcaaaagctcatttctgaagaggacttgttgcggaaacgacgagaacagttgaaacacaaacttgaacagctacggaactcttgtgcgtaaggaaaagtaaggaaaacgattccttctaacagaaatgtcctgagcaatcacctatgaacttgtttcaaatgcatgatcaaatgcaacctcacaaccttggctgagtcttgagactgaaagatttagccataatgtaaactgcctcaaattggactttgggcataaaagaacttttttatgcttaccatcttttttttttctttaacagatttgtatttaagaattgtttttaaaaaattttaagatttacacaatgtttctctgtaaatattgccattaaatgtaaataactttaataaaacgtttatagcagttacacagaatttcaatcctagtatatagtacctagtattataggtactataaaccctaattttttttatttaagtacattttgctttttaaagttgatttttttctattgtttttagaaaaaataaaataactggcaaatatatcattgagccaaatcttaa

SEQ ID NO: 1162 - DNA, 2397 bp, Homo sapiens
ggagtttattcataacgcgctctccaagtatacgtggcaatgcgttgctgggttattttaatcattctaggcatcgttttcctccttatgcctctatcattcctccctatctacactaacatcccacgctctgaacgcgcgcccattaatacccttctttcctccactctccctgggactcttgatcaaagcgcggccctttccccagccttagcgaggcgccctgcagcctggtacgcgcgtggcgtggcggtgggcgcgcagtgcgttctcggtgtggagggcagctgttccgcctgcgatgatttatactcacaggacaaggatgcggtttgtcaaacagtactgctacggaggagcagcagagaaagggagagggtttgagagggagcaaaagaaaatgcagcgggcgggcactttgcactggaacttacaacacccgagcaaggacgcgactctcccgacgcggggaggctattctgcccatttggggacacttccccgccgctgccaggacccgcttctctgaaaggctctccttgcagctgcttagacgctggatttttttcgggtagtggaaaaccagcagcctcccgcgacgatgcccctcaacgttagcttcaccaacaggaactatgacctcgactacgactcggtgcagccgtatttctactgcgacgaggaggagaacttctaccagcagcagcagcagagcgagctgcagcccccggcgcccagcgaggatatctggaagaaattcgagctgctgcccaccccgcccctgtcccctagccgccgctccgggctctgctcgccctcctacgttgcggtcacacccttctcccttcggggagacaacgacggcggtggcgggagcttctccacggccgaccagctggagatggtgaccgagctgctgggaggagacatggtgaaccagagtttcatctgcgacccggacgacgagaccttcatcaaaaacatcatcatccaggactgtatgtggagcggcttctcggccgccgccaagctcgtctcagagaagctggcctcctaccaggctgcgcgcaaagacagcggcagcccgaaccccgcccgcggccacagcgtctgctccacctccagcttgtacctgcaggatctgagcgccgccgcctcagagtgcatcgacccctcggtggtcttcccctaccctctcaacgacagcagctcgcccaagtcctgcgcctcgcaagactccagcgccttctctccgtcctcggattctctgctctcctcgacggagtcctccccgcagggcagccccgagcccctggtgctccatgaggagacaccgcccaccaccagcagcgactctgaggaggaacaagaagatgaggaagaaatcgatgttgtttctgtggaaaagaggcaggctcctggcaaaaggtcagagtctggatcaccttctgctggaggccacagcaaacctcctcacagcccactggtcctcaagaggtgccacgtctccacacatcagcacaactacgcagcgcctccctccactcggaaggactatcctgctgccaagagggtcaagttggacagtgtcagagtcctgagacagatcagcaacaaccgaaaatgcaccagccccaggtcctcggacaccgaggagaatgtcaagaggcgaacacacaacgtcttggagcgccagaggaggaacgagctaaaacggagcttttttgccctgcgtgaccagatcccggagttggaaaacaatgaaaaggcccccaaggtagttatccttaaaaaagccacagcatacatcctgtccgtccaagcagaggagcaaaagctcatttctgaagaggacttgttgcggaaacgacgagaacagttgaaacacaaacttgaacagctacggaactcttgtgcgtaaggaaaagtaaggaaaacgattccttctaacagaaatgtcctgagcaatcacctatgaacttgtttcaaatgcatgatcaaatgcaacctcacaaccttggctgagtcttgagactgaaagatttagccataatgtaaactgcctcaaattggactttgggcataaaagaacttttttatgcttaccatcttttttttttctttaacagatttgtatttaagaattgtttttaaaaaattttaagatttacacaatgtttctctgtaaatattgccattaaatgtaaataactttaataaaacgtttatagcagttacacagaatttcaatcctagtatatagtacctagtattataggtactataaaccctaattttttttatttaagtacattttgctttttaaagttgatttttttctattgtttttagaaaaaataaaataactggcaaatatatcattgagccaaatcttaa

SEQ ID NO: 1163 - DNA, 3028 bp, Homo sapiens
ggagtttattcataacgcgctctccaagtatacgtggcaatgcgttgctgggttattttaatcattctaggcatcgttttcctccttatgcctctatcattcctccctatctacactaacatcccacgctctgaacgcgcgcccattaatacccttctttcctccactctccctgggactcttgatcaaagcgcggccctttccccagccttagcgaggcgccctgcagcctggtacgcgcgtggcgtggcggtgggcgcgcagtgcgttctcggtgtggagggcagctgttccgcctgcgatgatttatactcacaggacaaggatgcggtttgtcaaacagtactgctacggaggagcagcagagaaagggagagggtttgagagggagcaaaagaaaatggtaggcgcgcgtagttaattcatgcggctctcttactctgtttacatcctagagctagagtgctcggctgcccggctgagtctcctccccaccttccccaccctccccaccctccccataagcgcccctcccgggttcccaaagcagagggcgtgggggaaaagaaaaaagatcctctctcgctaatctccgcccaccggccctttataatgcgagggtctggacggctgaggacccccgagctgtgctgctcgcggccgccaccgccgggccccggccgtccctggctcccctcctgcctcgagaagggcagggcttctcagaggcttggcgggaaaaagaacggagggagggatcgcgctgagtataaaagccggttttcggggctttatctaactcgctgtagtaattccagcgagaggcagagggagcgagcgggcggccggctagggtggaagagccgggcgagcagagctgcgctgcgggcgtcctgggaagggagatccggagcgaatagggggcttcgcctctggcccagccctcccgctgatcccccagccagcggtccgcaacccttgccgcatccacgaaactttgcccatagcagcgggcgggcactttgcactggaacttacaacacccgagcaaggacgcgactctcccgacgcggggaggctattctgcccatttggggacacttccccgccgctgccaggacccgcttctctgaaaggctctccttgcagctgcttagacgctggatttttttcgggtagtggaaaaccagcagcctcccgcgacgatgcccctcaacgttagcttcaccaacaggaactatgacctcgactacgactcggtgcagccgtatttctactgcgacgaggaggagaacttctaccagcagcagcagcagagcgagctgcagcccccggcgcccagcgaggatatctggaagaaattcgagctgctgcccaccccgcccctgtcccctagccgccgctccgggctctgctcgccctcctacgttgcggtcacacccttctcccttcggggagacaacgacggcggtggcgggagcttctccacggccgaccagctggagatggtgaccgagctgctgggaggagacatggtgaaccagagtttcatctgcgacccggacgacgagaccttcatcaaaaacatcatcatccaggactgtatgtggagcggcttctcggccgccgccaagctcgtctcagagaagctggcctcctaccaggctgcgcgcaaagacagcggcagcccgaaccccgcccgcggccacagcgtctgctccacctccagcttgtacctgcaggatctgagcgccgccgcctcagagtgcatcgacccctcggtggtcttcccctaccctctcaacgacagcagctcgcccaagtcctgcgcctcgcaagactccagcgccttctctccgtcctcggattctctgctctcctcgacggagtcctccccgcagggcagccccgagcccctggtgctccatgaggagacaccgcccaccaccagcagcgactctggagtgatttctatttcctttcttaaagaggaggaacaagaagatgaggaagaaatcgatgttgtttctgtggaaaagaggcaggctcctggcaaaaggtcagagtctggatcaccttctgctggaggccacagcaaacctcctcacagcccactggtcctcaagaggtgccacgtctccacacatcagcacaactacgcagcgcctccctccactcggaaggactatcctgctgccaagagggtcaagttggacagtgtcagagtcctgagacagatcagcaacaaccgaaaatgcaccagccccaggtcctcggacaccgaggagaatgtcaagaggcgaacacacaacgtcttggagcgccagaggaggaacgagctaaaacggagcttttttgccctgcgtgaccagatcccggagttggaaaacaatgaaaaggcccccaaggtagttatccttaaaaaagccacagcatacatcctgtccgtccaagcagaggagcaaaagctcatttctgaagaggacttgttgcggaaacgacgagaacagttgaaacacaaacttgaacagctacggaactcttgtgcgtaaggaaaagtaaggaaaacgattccttctaacagaaatgtcctgagcaatcacctatgaacttgtttcaaatgcatgatcaaatgcaacctcacaaccttggctgagtcttgagactgaaagatttagccataatgtaaactgcctcaaattggactttgggcataaaagaacttttttatgcttaccatcttttttttttctttaacagatttgtatttaagaattgtttttaaaaaattttaagatttacacaatgtttctctgtaaatattgccattaaatgtaaataactttaataaaacgtttatagcagttacacagaatttcaatcctagtatatagtacctagtattataggtactataaaccctaattttttttatttaagtacattttgctttttaaagttgatttttttctattgtttttagaaaaaataaaataactggcaaatatatcattgagccaaatcttaa

SEQ ID NO: 1164 - DNA, 3746 bp, Homo sapiens
ggagtttattcataacgcgctctccaagtatacgtggcaatgcgttgctgggttattttaatcattctaggcatcgttttcctccttatgcctctatcattcctccctatctacactaacatcccacgctctgaacgcgcgcccattaatacccttctttcctccactctccctgggactcttgatcaaagcgcggccctttccccagccttagcgaggcgccctgcagcctggtacgcgcgtggcgtggcggtgggcgcgcagtgcgttctcggtgtggagggcagctgttccgcctgcgatgatttatactcacaggacaaggatgcggtttgtcaaacagtactgctacggaggagcagcagagaaagggagagggtttgagagggagcaaaagaaaatgcagcgggcgggcactttgcactggaacttacaacacccgagcaaggacgcgactctcccgacgcggggaggctattctgcccatttggggacacttccccgccgctgccaggacccgcttctctgaaaggctctccttgcagctgcttagacgctggatttttttcgggtagtggaaaaccagcagcctcccgcgacgatgcccctcaacgttagcttcaccaacaggaactatgacctcgactacgactcggtgcagccgtatttctactgcgacgaggaggagaacttctaccagcagcagcagcagagcgagctgcagcccccggcgcccagcgaggatatctggaagaaattcgagctgctgcccaccccgcccctgtcccctagccgccgctccgggctctgctcgccctcctacgttgcggtcacacccttctcccttcggggagacaacgacggcggtggcgggagcttctccacggccgaccagctggagatggtgaccgagctgctgggaggagacatggtgaaccagagtttcatctgcgacccggacgacgagaccttcatcaaaaacatcatcatccaggactgtatgtggagcggcttctcggccgccgccaagctcgtctcagagaagctggcctcctaccaggctgcgcgcaaagacagcggcagcccgaaccccgcccgcggccacagcgtctgctccacctccagcttgtacctgcaggatctgagcgccgccgcctcagagtgcatcgacccctcggtggtcttcccctaccctctcaacgacagcagctcgcccaagtcctgcgcctcgcaagactccagcgccttctctccgtcctcggattctctgctctcctcgacggagtcctccccgcagggcagccccgagcccctggtgctccatgaggagacaccgcccaccaccagcagcgactctggtaagcgaagcccgcccaggcctgtcaaaagtgggcggctggatacctttcccattttcattggcagcttatttaacgggccactcttattaggaaggagagatagcagatctggagagatttgggagctcatcacctctgaaaccttgggctttagcgtttcctcccatcccttccccttagactgcccatgtttgcagcccccctccccgtttgtctcccacccctcaggaatttcatttaggtttttaaaccttctggcttatcttacaactcaatccacttcttcttacctcccgttaacattttaattgccctggggcggggtggcagggagtgtatgaatgaggataagagaggattgatctctgagagtgaatgaattgcttccctcttaacttccgagaagtggtgggatttaatgaactatctacaaaaatgaggggctgtgtttagaggctaggcagggcctgcctgagtgcgggagccagtgaactgcctcaagagtgggtgggctgaggagctgggatcttctcagcctattttgaacactgaaaagcaaatccttgccaaagttggacttttttttttcttttattccttcccccgccctcttggacttttggcaaaactgcaatttttttttttttatttttcatttccagtaaaatagggagttgctaaagtcataccaagcaatttgcagctatcatttgcaacacctgaagtgttcttggtaaagtccctcaaaaataggaggtgcttgggaatgtgctttgctttgggtgtgtccaaagcctcattaagtcttaggtaagaattggcatcaatgtcctatcctgggaagttgcacttttcttgtccatgccataacccagctgtctttccctttatgagactcttaccttcatggtgagaggagtaagggtggctggctagattggttcttttttttttttttcccttttttaagacggagtctcactctgtcactaggctggagtgcagtggcgcaatcaacctccaaccccctggttcaagagattctcctgcctcagcctcccaagtagctgggactacaggtgcacaccaccatgccaggctaatttttgtaattttagtagagatggggtttcatcgtgttggccaggatggtctctcctgacctcacgatccgcccacctcggcctcccaaagtgctgggattacaggtgtgagccagggcaccaggcttagatgtggctctttggggagataattttgtccagagacctttctaacgtattcatgccttgtatttgtacagcattaatctggtaattgattattttaatgtaaccttgctaaagaggaggaacaagaagatgaggaagaaatcgatgttgtttctgtggaaaagaggcaggctcctggcaaaaggtcagagtctggatcaccttctgctggaggccacagcaaacctcctcacagcccactggtcctcaagaggtgccacgtctccacacatcagcacaactacgcagcgcctccctccactcggaaggactatcctgctgccaagagggtcaagttggacagtgtcagagtcctgagacagatcagcaacaaccgaaaatgcaccagccccaggtcctcggacaccgaggagaatgtcaagaggcgaacacacaacgtcttggagcgccagaggaggaacgagctaaaacggagcttttttgccctgcgtgaccagatcccggagttggaaaacaatgaaaaggcccccaaggtagttatccttaaaaaagccacagcatacatcctgtccgtccaagcagaggagcaaaagctcatttctgaagaggacttgttgcggaaacgacgagaacagttgaaacacaaacttgaacagctacggaactcttgtgcgtaaggaaaagtaaggaaaacgattccttctaacagaaatgtcctgagcaatcacctatgaacttgtttcaaatgcatgatcaaatgcaacctcacaaccttggctgagtcttgagactgaaagatttagccataatgtaaactgcctcaaattggactttgggcataaaagaacttttttatgcttaccatcttttttttttctttaacagatttgtatttaagaattgtttttaaaaaattttaagatttacacaatgtttctctgtaaatattgccattaaatgtaaataactttaataaaacgtttatagcagttacacagaatttcaatcctagtatatagtacctagtattataggtactataaaccctaattttttttatttaagtacattttgctttttaaagttgatttttttctattgtttttagaaaaaataaaataactggcaaatatatcattgagccaaatcttaa

SEQ ID NO: 1165 - DNA, 2424 bp, Homo sapiens
ggagtttattcataacgcgctctccaagtatacgtggcaatgcgttgctgggttattttaatcattctaggcatcgttttcctccttatgcctctatcattcctccctatctacactaacatcccacgctctgaacgcgcgcccattaatacccttctttcctccactctccctgggactcttgatcaaagcgcggccctttccccagccttagcgaggcgccctgcagcctggtacgcgcgtggcgtggcggtgggcgcgcagtgcgttctcggtgtggagggcagctgttccgcctgcgatgatttatactcacaggacaaggatgcggtttgtcaaacagtactgctacggaggagcagcagagaaagggagagggtttgagagggagcaaaagaaaatgcagcgggcgggcactttgcactggaacttacaacacccgagcaaggacgcgactctcccgacgcggggaggctattctgcccatttggggacacttccccgccgctgccaggacccgcttctctgaaaggctctccttgcagctgcttagacgctggatttttttcgggtagtggaaaaccagcagcctcccgcgacgatgcccctcaacgttagcttcaccaacaggaactatgacctcgactacgactcggtgcagccgtatttctactgcgacgaggaggagaacttctaccagcagcagcagcagagcgagctgcagcccccggcgcccagcgaggatatctggaagaaattcgagctgctgcccaccccgcccctgtcccctagccgccgctccgggctctgctcgccctcctacgttgcggtcacacccttctcccttcggggagacaacgacggcggtggcgggagcttctccacggccgaccagctggagatggtgaccgagctgctgggaggagacatggtgaaccagagtttcatctgcgacccggacgacgagaccttcatcaaaaacatcatcatccaggactgtatgtggagcggcttctcggccgccgccaagctcgtctcagagaagctggcctcctaccaggctgcgcgcaaagacagcggcagcccgaaccccgcccgcggccacagcgtctgctccacctccagcttgtacctgcaggatctgagcgccgccgcctcagagtgcatcgacccctcggtggtcttcccctaccctctcaacgacagcagctcgcccaagtcctgcgcctcgcaagactccagcgccttctctccgtcctcggattctctgctctcctcgacggagtcctccccgcagggcagccccgagcccctggtgctccatgaggagacaccgcccaccaccagcagcgactctggagtgatttctatttcctttcttaaagaggaggaacaagaagatgaggaagaaatcgatgttgtttctgtggaaaagaggcaggctcctggcaaaaggtcagagtctggatcaccttctgctggaggccacagcaaacctcctcacagcccactggtcctcaagaggtgccacgtctccacacatcagcacaactacgcagcgcctccctccactcggaaggactatcctgctgccaagagggtcaagttggacagtgtcagagtcctgagacagatcagcaacaaccgaaaatgcaccagccccaggtcctcggacaccgaggagaatgtcaagaggcgaacacacaacgtcttggagcgccagaggaggaacgagctaaaacggagcttttttgccctgcgtgaccagatcccggagttggaaaacaatgaaaaggcccccaaggtagttatccttaaaaaagccacagcatacatcctgtccgtccaagcagaggagcaaaagctcatttctgaagaggacttgttgcggaaacgacgagaacagttgaaacacaaacttgaacagctacggaactcttgtgcgtaaggaaaagtaaggaaaacgattccttctaacagaaatgtcctgagcaatcacctatgaacttgtttcaaatgcatgatcaaatgcaacctcacaaccttggctgagtcttgagactgaaagatttagccataatgtaaactgcctcaaattggactttgggcataaaagaacttttttatgcttaccatcttttttttttctttaacagatttgtatttaagaattgtttttaaaaaattttaagatttacacaatgtttctctgtaaatattgccattaaatgtaaataactttaataaaacgtttatagcagttacacagaatttcaatcctagtatatagtacctagtattataggtactataaaccctaattttttttatttaagtacattttgctttttaaagttgatttttttctattgtttttagaaaaaataaaataactggcaaatatatcattgagccaaatcttaa

SEQ ID NO: 1166 - DNA, 330 bp, Artificial
  Synthetic oligonucleotide
ggagtttattcataacgcgctctccaagtatacgtggcaatgcgttgctgggttattttaatcattctaggcatcgttttcctccttatgcctctatcattcctccctatctacactaacatcccacgctctgaacgcgcgcccattaatacccttctttcctccactctccctgggactcttgatcaaagcgcggccctttccccagccttagcgaggcgccctgcagcctggtacgcgcgtggcgtggcggtgggcgcgcagtgcgttctcggtgtggagggcagctgttccgcctgcgatgatttatactcacaggacaaggatgcg

SEQ ID NO: 1167 - DNA, 352 bp, Artificial
  Synthetic oligonucleotide
gtaggcgcgcgtagttaattcatgcggctctcttactctgtttacatcctagagctagagtgctcggctgcccggctgagtctcctccccaccttccccaccctccccaccctccccataagcgcccctcccgggttcccaaagcagagggcgtgggggaaaagaaaaaagatcctctctcgctaatctccgcccaccggccctttataatgcgagggtctggacggctgaggacccccgagctgtgctgctcgcggccgccaccgccgggccccggccgtccctggctcccctcctgcctcgagaagggcagggcttctcagaggcttggcgggaaaaagaacggagggag

SEQ ID NO: 1168 - DNA, 146 bp, Artificial
  Synthetic oligonucleotide
agccgggcgagcagagctgcgctgcgggcgtcctgggaagggagatccggagcgaatagggggcttcgcctctggcccagccctcccgctgatcccccagccagcggtccgcaacccttgccgcatccacgaaactttgcccatag

SEQ ID NO: 1169 - DNA, 183 bp, Artificial
  Synthetic oligonucleotide
cagcgggcgggcactttgcactggaacttacaacacccgagcaaggacgcgactctcccgacgcggggaggctattctgcccatttggggacacttccccgccgctgccaggacccgcttctctgaaaggctctccttgcagctgcttagacgctggatttttttcgggtagtggaaaaccag

SEQ ID NO: 1170 - DNA, 330 bp, Artificial
  Synthetic oligonucleotide
gtaagcaccgaagtccacttgccttttaatttatttttttatcactttaatgctgagatgagtcgaatgcctaaatagggtgtcttttctcccattcctgcgctattgacacttttctcagagtagttatggtaactggggctggggtggggggtaatccagaactggatcggggtaaagtgacttgtcaagatgggagaggagaaggcagagggaaaacgggaatggtttttaagactaccctttcgagatttctgccttatgaatatattcacgctgactcccggccggtcggacattcctgctttattgtgttaattgctctctggg

SEQ ID NO: 1171 - DNA, 1294 bp, Artificial
  Synthetic oligonucleotide
ttttggggggctgggggttgctttgcggtgggcagaaagccccttgcatcctgagctccttggagtagggaccgcatatcgcctgtgtgagccagatcgctccgcagccgctgacttgtccccgtctccgggagggcatttaaatttcggctcaccgcatttctgacagccggagacggacactgcggcgcgtcccgcccgcctgtccccgcggcgattccaacccgccctgatccttttaagaagttggcatttggctttttaaaaagcaataatacaatttaaaacctgggtctctagaggtgttaggacgtggtgttgggtaggcgcaggcaggggaaaagggaggcgaggatgtgtccgattctcctggaatcgttgacttggaaaaaccagggcgaatctccgcacccagccctgactcccctgccgcggccgccctcgggtgtcctcgcgcccgagatgcggaggaactgcgaggagcggggctctgggcggttccagaacagctgctacccttggtggggtggctccgggggaggtatcgcagcggggtctctggcgcagttgcatctccgtattgagtgcgaagggaggtgcccctattattatttgacaccccccttgtatttatggaggggtgttaaagcccgcggctgagctcgccactccagccggcgagagaaagaagaaaagctggcaaaaggagtgttggacgggggcggtactgggggtggggacgggggcggtggagagggaaggttgggaggggctgcggtgccggcgggggtaggagagcggctagggcgcgagtgggaacagccgcagcggaggggccccggcgcggagcggggttcacgcagccgctagcgcccaggcgcctctcgccttctccttcaggtggcgcaaaactttgtgccttggattttgtcaaattgttttcctcaccgccacctcccgcggcttcttaagggcgccagggccgatttcgattcctctgccgctgcggggccgactcccgggctttgcgctccgggctcccgggggagcgggggctcggcgggcaccaagccgctggttcactaagtgcgtctccgagatagcaggggactgtccaaagggggtgaaagggtgctccctttattcccccaccaagaccacccagccgctttaggggatagctctgcaaggggagaggttcgggactgtggcgcgcactgcgcgctgcgccaggtttccgcaccaagacccctttaactcaagactgcctcccgctttgtgtgccccgctccag

SEQ ID NO: 1172 - DNA, 212 bp, Artificial
  Synthetic oligonucleotide
cagcctcccgcgacgatgcccctcaacgttagcttcaccaacaggaactatgacctcgactacgactcggtgcagccgtatttctactgcgacgaggaggagaacttctaccagcagcagcagcagagcgagctgcagcccccggcgcccagcgaggatatctggaagaaattcgagctgctgcccaccccgcccctgtcccctagccgccg

SEQ ID NO: 1173 - DNA, 482 bp, Artificial
  Synthetic oligonucleotide
cttctccacggccgaccagctggagatggtgaccgagctgctgggaggagacatggtgaaccagagtttcatctgcgacccggacgacgagaccttcatcaaaaacatcatcatccaggactgtatgtggagcggcttctcggccgccgccaagctcgtctcagagaagctggcctcctaccaggctgcgcgcaaagacagcggcagcccgaaccccgcccgcggccacagcgtctgctccacctccagcttgtacctgcaggatctgagcgccgccgcctcagagtgcatcgacccctcggtggtcttcccctaccctctcaacgacagcagctcgcccaagtcctgcgcctcgcaagactccagcgccttctctccgtcctcggattctctgctctcctcgacggagtcctccccgcagggcagccccgagcccctggtgctccatgaggagacaccgcccaccaccagcagcgactctg

SEQ ID NO: 1174 - DNA, 1349 bp, Artificial
  Synthetic oligonucleotide
gtaagcgaagcccgcccaggcctgtcaaaagtgggcggctggatacctttcccattttcattggcagcttatttaacgggccactcttattaggaaggagagatagcagatctggagagatttgggagctcatcacctctgaaaccttgggctttagcgtttcctcccatcccttccccttagactgcccatgtttgcagcccccctccccgtttgtctcccacccctcaggaatttcatttaggtttttaaaccttctggcttatcttacaactcaatccacttcttcttacctcccgttaacattttaattgccctggggcggggtggcagggagtgtatgaatgaggataagagaggattgatctctgagagtgaatgaattgcttccctcttaacttccgagaagtggtgggatttaatgaactatctacaaaaatgaggggctgtgtttagaggctaggcagggcctgcctgagtgcgggagccagtgaactgcctcaagagtgggtgggctgaggagctgggatcttctcagcctattttgaacactgaaaagcaaatccttgccaaagttggacttttttttttcttttattccttcccccgccctcttggacttttggcaaaactgcaatttttttttttttatttttcatttccagtaaaatagggagttgctaaagtcataccaagcaatttgcagctatcatttgcaacacctgaagtgttcttggtaaagtccctcaaaaataggaggtgcttgggaatgtgctttgctttgggtgtgtccaaagcctcattaagtcttaggtaagaattggcatcaatgtcctatcctgggaagttgcacttttcttgtccatgccataacccagctgtctttccctttatgagactcttaccttcatggtgagaggagtaagggtggctggctagattggttcttttttttttttttcccttttttaagacggagtctcactctgtcactaggctggagtgcagtggcgcaatcaacctccaaccccctggttcaagagattctcctgcctcagcctcccaagtagctgggactacaggtgcacaccaccatgccaggctaatttttgtaattttagtagagatggggtttcatcgtgttggccaggatggtctctcctgacctcacgatccgcccacctcggcctcccaaagtgctgggattacaggtgtgagccagggcaccaggcttagatgtggctctttggggagataattttgtccagagacctttctaacgtattcatgccttgtatttgtacagcattaatctggtaattgattattttaatgtaaccttgctaaag

SEQ ID NO: 1175 - DNA, 1039 bp, Artificial
  Synthetic oligonucleotide
aggaggaacaagaagatgaggaagaaatcgatgttgtttctgtggaaaagaggcaggctcctggcaaaaggtcagagtctggatcaccttctgctggaggccacagcaaacctcctcacagcccactggtcctcaagaggtgccacgtctccacacatcagcacaactacgcagcgcctccctccactcggaaggactatcctgctgccaagagggtcaagttggacagtgtcagagtcctgagacagatcagcaacaaccgaaaatgcaccagccccaggtcctcggacaccgaggagaatgtcaagaggcgaacacacaacgtcttggagcgccagaggaggaacgagctaaaacggagcttttttgccctgcgtgaccagatcccggagttggaaaacaatgaaaaggcccccaaggtagttatccttaaaaaagccacagcatacatcctgtccgtccaagcagaggagcaaaagctcatttctgaagaggacttgttgcggaaacgacgagaacagttgaaacacaaacttgaacagctacggaactcttgtgcgtaaggaaaagtaaggaaaacgattccttctaacagaaatgtcctgagcaatcacctatgaacttgtttcaaatgcatgatcaaatgcaacctcacaaccttggctgagtcttgagactgaaagatttagccataatgtaaactgcctcaaattggactttgggcataaaagaacttttttatgcttaccatcttttttttttctttaacagatttgtatttaagaattgtttttaaaaaattttaagatttacacaatgtttctctgtaaatattgccattaaatgtaaataactttaataaaacgtttatagcagttacacagaatttcaatcctagtatatagtacctagtattataggtactataaaccctaattttttttatttaagtacattttgctttttaaagttgatttttttctattgtttttagaaaaaataaaataactggcaaatatatcattgagccaaatcttaa

SEQ ID NO: 1176 - DNA, 48 bp, Artificial
  Synthetic oligonucleotide
gtttgtcaaacagtactgctacggaggagcagcagagaaagggagagg

SEQ ID NO: 1177 - DNA, 25 bp, Artificial
  Synthetic oligonucleotide
gtttgagagggagcaaaagaaaatg

SEQ ID NO: 1178 - DNA, 8 bp, Artificial
  Synthetic oligonucleotide
ggatcgcg

SEQ ID NO: 1179 - DNA, 86 bp, Artificial
  Synthetic oligonucleotide
ctgagtataaaagccggttttcggggctttatctaactcgctgtagtaattccagcgagaggcagagggagcgagcgggcggccgg

SEQ ID NO: 1180 - DNA, 12 bp, Artificial
  Synthetic oligonucleotide
ctagggtggaag

SEQ ID NO: 1181 - DNA, 78 bp, Artificial
  Synthetic oligonucleotide
ctccgggctctgctcgccctcctacgttgcggtcacacccttctcccttcggggagacaacgacggcggtggcgggag

SEQ ID NO: 1182 - DNA, 27 bp, Artificial
  Synthetic oligonucleotide
gagtgatttctatttcctttcttaaag

SEQ ID NO: 1183 - protein, 439 aa, Homo sapiens
MPLNVSFTNRNYDLDYDSVQPYFYCDEEENFYQQQQQSELQPPAPSEDIWKKFELLPTPPLSPSRRSGLCSPSYVAVTPFSLRGDNDGGGGSFSTADQLEMVTELLGGDMVNQSFICDPDDETFIKNIIIQDCMWSGFSAAAKLVSEKLASYQAARKDSGSPNPARGHSVCSTSSLYLQDLSAAASECIDPSVVFPYPLNDSSSPKSCASQDSSAFSPSSDSLLSSTESSPQGSPEPLVLHEETPPTTSSDSEEEQEDEEEIDVVSVEKRQAPGKRSESGSPSAGGHSKPPHSPLVLKRCHVSTHQHNYAAPPSTRKDYPAAKRVKLDSVRVLRQISNNRKCTSPRSSDTEENVKRRTHNVLERQRRNELKRSFFALRDQIPELENNEKAPKVVILKKATAYILSVQAEEQKLISEEDLLRKRREQLKHKLEQLRNSCA

SEQ ID NO: 1184 - protein, 355 aa, Homo sapiens [sequence omitted]

SEQ ID NO: 1185 - protein, 448 aa, Homo sapiens
MPLNVSFTNRNYDLDYDSVQPYFYCDEEENFYQQQQQSELQPPAPSEDIWKKFELLPTPPLSPSRRSGLCSPSYVAVTPFSLRGDNDGGGGSFSTADQLEMVTELLGGDMVNQSFICDPDDETFIKNIIIQDCMWSGFSAAAKLVSEKLASYQAARKDSGSPNPARGHSVCSTSSLYLQDLSAAASECIDPSVVFPYPLNDSSSPKSCASQDSSAFSPSSDSLLSSTESSPQGSPEPLVLHEETPPTTSSDSGVISISFLKEEEQEDEEEIDVVSVEKRQAPGKRSESGSPSAGGHSKPPHSPLVLKRCHVSTHQHNYAAPPSTRKDYPAAKRVKLDSVRVLRQISNNRKCTSPRSSDTEENVKRRTHNVLERQRRNELKRSFFALRDQIPELENNEKAPKVVILKKATAYILSVQAEEQKLISEEDLLRKRREQLKHKLEQLRNSCA

SEQ ID NO: 1186 - protein, 114 aa, Homo sapiens
MRCWVILIILGIVFLLMPLSFLPIYTNIPRSERAPINTLLSSTLPGTLDQSAALSPALARRPAAWYARGVAVGAQCVLGVEGSCSACDDLYSQDKDAVCQTVLLRRSSRERERV

SEQ ID NO: 1187 - DNA, 2038 bp, Homo sapiens
tctagaggatccgccaagaggtagaagaaacagtatccacagtggactccggggctcctacagacttggcacagcttcctacagtcttgaaacagccctgttgttctgtcatggccagtgggcagtttgtgaacaaactgcaagaggaagtgatctgccccatctgcctggacattctgcagaaacctgtcaccatcgactgtgggcacaatttctgcctcaaatgcatcactcagattggggaaacatcatgtggatttttcaaatgtcccctctgcaaaacttccgtaaggaagaacgcaatcaggttcaactcgctgttgcggaatctggtggagaaaatccaagctctacaagcctctgaggtgcagtccaaaaggaaagaggctacatgcccgaggcaccaggagatgttccactatttctgcgaggatgatgggaagttcctctgttttgtgtgtcgtgaatccaaggaccacaaatcccataatgtcagcttgatcgaagaagctgcccagaattatcaggggcagattcaagagcagatccaagtcttgcagcaaaaggagaaggagacagtacaagtgaaggcacaaggtgtacacagggtcgatgtcttcacggaccaggtagaacatgagaagcaaaggatcctcacagaatttgaactcctgcatcaagtcctagaggaggagaagaatttcctgctatcacggatttactggctgggtcatgagggaacggaagcggggaaacactatgttgcctccactgagccacagttgaacgatctcaagaagctcgttgattccctgaagaccaagcagaacatgccacccaggcagctgctggaggatatcaaagtcgtcttgtgcagaagtgaagagtttcagtttctcaacccaacccctgttcctctggaactggagaaaaaactcagtgaagcaaaatcaagacacgactccatcacagggagcctgaaaaaattcaaagaccaactccaggctgataggaaaaaagatgaaaacagattcttcaaaagcatgaataaaaatgacatgaagagctggggcttgttacagaaaaataatcataaaatgaacaaaacctcagagcccgggtcatcttctgcaggcggcagaactacatcggggccaccaaatcaccactcttcagccccatcccactccctgtttcgggcctcgtctgctgggaaagtcacttttccagtatgtctcctggcctcttatgatgagatttctggtcaaggagcgagctctcaggatacgaagacatttgacgttgcgctgtccgaggagctccatgcggcactgagtgagtggctgacagcgatccgggcttggttttgtgaggttccttcaagctaagccagctcagagaacacggggagcggtggtgctacacggacttcggagcatagagtggcgctgagtgagtggctgagaccgaccacggttcttgacttagtggaattgggtcgaaggagtggagaatgggagggctcgggctactgagagtggagatgggggcgggggtggtggtgaagagagttggagaaggaatggacgagttcttgagcaaaaggaggggaagagacaatctccagccacccgccccacgcttgacttcttatcactttggctgtggtgccgcctagtggaaaaaggaagtccctgcagcagtccccgcactctttaagcagctgtttaccgaaggcaccagttcagccaggagtgaaatccggagaggagcaacgccagcctgggtcacagtccatcaaaccccatgagcccgaccactctcgctcttccttacattcccacgtcccccttctctcccaacccctcatatcagcaagggaaattaattaatgagatttgataaatcagtagatagaatgaggtccccattctgaaatatttagcagactggaaccaccacgcaagcctctgtagggggtggatggagacacttctaactttaataaactgcgactgaacgtggaatcctagaaaaa

SEQ ID NO: 1188 - DNA, 2066 bp, Homo sapiens
ctaattggcagaatctctgacctccactttctctgactcccttctcccttcctagaaacagtatccacagtggactccggggctcctacagacttggcacagcttcctacagtcttgaaacagccctgttgttctgtcatggccagtgggcagtttgtgaacaaactgcaagaggaagtgatctgccccatctgcctggacattctgcagaaacctgtcaccatcgactgtgggcacaatttctgcctcaaatgcatcactcagattggggaaacatcatgtggatttttcaaatgtcccctctgcaaaacttccgtaaggaagaacgcaatcaggttcaactcgctgttgcggaatctggtggagaaaatccaagctctacaagcctctgaggtgcagtccaaaaggaaagaggctacatgcccgaggcaccaggagatgttccactatttctgcgaggatgatgggaagttcctctgttttgtgtgtcgtgaatccaaggaccacaaatcccataatgtcagcttgatcgaagaagctgcccagaattatcaggggcagattcaagagcagatccaagtcttgcagcaaaaggagaaggagacagtacaagtgaaggcacaaggtgtacacagggtcgatgtcttcacggaccaggtagaacatgagaagcaaaggatcctcacagaatttgaactcctgcatcaagtcctagaggaggagaagaatttcctgctatcacggatttactggctgggtcatgagggaacggaagcggggaaacactatgttgcctccactgagccacagttgaacgatctcaagaagctcgttgattccctgaagaccaagcagaacatgccacccaggcagctgctggaggatatcaaagtcgtcttgtgcagaagtgaagagtttcagtttctcaacccaacccctgttcctctggaactggagaaaaaactcagtgaagcaaaatcaagacacgactccatcacagggagcctgaaaaaattcaaagaccaactccaggctgataggaaaaaagatgaaaacagattcttcaaaagcatgaataaaaatgacatgaagagctggggcttgttacagaaaaataatcataaaatgaacaaaacctcagagcccgggtcatcttctgcaggcggcagaactacatcggggccaccaaatcaccactcttcagccccatcccactccctgtttcgggcctcgtctgctgggaaagtcacttttccagtatgtctcctggcctcttatgatgagatttctggtcaaggagcgagctctcaggatacgaagacatttgacgttgcgctgtccgaggagctccatgcggcactgagtgagtggctgacagcgatccgggcttggttttgtgaggttccttcaagctaagccagctcagagaacacggggagcggtggtgctacacggacttcggagcatagagtggcgctgagtgagtggctgagaccgaccacggttcttgacttagtggaattgggtcgaaggagtggagaatgggagggctcgggctactgagagtggagatgggggcgggggtggtggtgaagagagttggagaaggaatggacgagttcttgagcaaaaggaggggaagagacaatctccagccacccgccccacgcttgacttcttatcactttggctgtggtgccgcctagtggaaaaaggaagtccctgcagcagtccccgcactctttaagcagctgtttaccgaaggcaccagttcagccaggagtgaaatccggagaggagcaacgccagcctgggtcacagtccatcaaaccccatgagcccgaccactctcgctcttccttacattcccacgtcccccttctctcccaacccctcatatcagcaagggaaattaattaatgagatttgataaatcagtagatagaatgaggtccccattctgaaatatttagcagactggaaccaccacgcaagcctctgtagggggtggatggagacacttctaactttaataaactgcgactgaacgtggaatcctagaaaaa

SEQ ID NO: 1189 - DNA, 2039 bp, Homo sapiens
tatccatttgttctcaagaggtagcaagaaacagtatccacagtggactccggggctcctacagacttggcacagcttcctacagtcttgaaacagccctgttgttctgtcatggccagtgggcagtttgtgaacaaactgcaagaggaagtgatctgccccatctgcctggacattctgcagaaacctgtcaccatcgactgtgggcacaatttctgcctcaaatgcatcactcagattggggaaacatcatgtggatttttcaaatgtcccctctgcaaaacttccgtaaggaagaacgcaatcaggttcaactcgctgttgcggaatctggtggagaaaatccaagctctacaagcctctgaggtgcagtccaaaaggaaagaggctacatgcccgaggcaccaggagatgttccactatttctgcgaggatgatgggaagttcctctgttttgtgtgtcgtgaatccaaggaccacaaatcccataatgtcagcttgatcgaagaagctgcccagaattatcaggggcagattcaagagcagatccaagtcttgcagcaaaaggagaaggagacagtacaagtgaaggcacaaggtgtacacagggtcgatgtcttcacggaccaggtagaacatgagaagcaaaggatcctcacagaatttgaactcctgcatcaagtcctagaggaggagaagaatttcctgctatcacggatttactggctgggtcatgagggaacggaagcggggaaacactatgttgcctccactgagccacagttgaacgatctcaagaagctcgttgattccctgaagaccaagcagaacatgccacccaggcagctgctggaggatatcaaagtcgtcttgtgcagaagtgaagagtttcagtttctcaacccaacccctgttcctctggaactggagaaaaaactcagtgaagcaaaatcaagacacgactccatcacagggagcctgaaaaaattcaaagaccaactccaggctgataggaaaaaagatgaaaacagattcttcaaaagcatgaataaaaatgacatgaagagctggggcttgttacagaaaaataatcataaaatgaacaaaacctcagagcccgggtcatcttctgcaggcggcagaactacatcggggccaccaaatcaccactcttcagccccatcccactccctgtttcgggcctcgtctgctgggaaagtcacttttccagtatgtctcctggcctcttatgatgagatttctggtcaaggagcgagctctcaggatacgaagacatttgacgttgcgctgtccgaggagctccatgcggcactgagtgagtggctgacagcgatccgggcttggttttgtgaggttccttcaagctaagccagctcagagaacacggggagcggtggtgctacacggacttcggagcatagagtggcgctgagtgagtggctgagaccgaccacggttcttgacttagtggaattgggtcgaaggagtggagaatgggagggctcgggctactgagagtggagatgggggcgggggtggtggtgaagagagttggagaaggaatggacgagttcttgagcaaaaggaggggaagagacaatctccagccacccgccccacgcttgacttcttatcactttggctgtggtgccgcctagtggaaaaaggaagtccctgcagcagtccccgcactctttaagcagctgtttaccgaaggcaccagttcagccaggagtgaaatccggagaggagcaacgccagcctgggtcacagtccatcaaaccccatgagcccgaccactctcgctcttccttacattcccacgtcccccttctctcccaacccctcatatcagcaagggaaattaattaatgagatttgataaatcagtagatagaatgaggtccccattctgaaatatttagcagactggaaccaccacgcaagcctctgtagggggtggatggagacacttctaactttaataaactgcgactgaacgtggaatcctagaaaaa

SEQ ID NO: 1190 - DNA, 1840 bp, Homo sapiens
ctaattggcagaatctctgacctccactttctctgactcccttctcccttcctagaaacagtatccacagtggactccggggctcctacagacttggcacagcttcctacagtcttgaaacagccctgttgttctgtcatggccagtgggcagtttgtgaacaaactgcaagaggaagtgatctgccccatctgcctggacattctgcagaaacctgtcaccatcgactgtgggcacaatttctgcctcaaatgcatcactcagattggggaaacatcatgtggatttttcaaatgtcccctctgcaaaacttccgtaaggaagaacgcaatcaggttcaactcgctgttgcggaatctggtggagaaaatccaagctctacaagcctctgaggtgcagtccaaaaggaaagaggctacatgcccgaggcaccaggagatgttccactatttctgcgaggatgatgggaagttcctctgttttgtgtgtcgtgaatccaaggaccacaaatcccataatgtcagcttgatcgaagaagctgcccagaattatcaggggcagattcaagagcagatccaagtcttgcagcaaaaggagaaggagacagtacaagtgaaggcacaaggtgtacacagggtcgatgtcttcacggaccaggtagaacatgagaagcaaaggatcctcacagaatttgaactcctgcatcaagtcctagaggaggagaagaatttcctgctatcacggatttactggctgggtcatgagggaacggaagcggggaaacactatgttgcctccactgagccacagttgaacgatctcaagaagctcgttgattccctgaagaccaagcagaacatgccacccaggcagctgctggaggatatcaaagtcgtcttgtgcagaagtgaagagtttcagtttctcaacccaacccctgttcctctggaactggagaaaaaactcagtgaagcaaaatcaagacacgactccatcacagggagcctgaaaaaattcaaagaccaactccaggctgataggaaaaaagatgaaaacagattcttcaaaagcatgaataaaaatgacatgaagagctggggcttgttacagaaaaataatcataaaatgaacaaaacctcagagcccgggtcatcttctgcaggcggcagaactacatcggggccaccaaatcaccactcttcagccccatcccactccctgtttcgggcctcgtctgctgggaaagtcacttttccagtatgtctcctggcctcttatgatgagatttctggtcaaggagcgagctctcaggatacgaagacatttgacgttgcgctgtccgaggagctccatgcggcactgagtgagtggctgacagcgatccgggcttggttttgtgaggttccttcaagctaagccagctcagagaacacggggagcggtggtgctacacggacttcggagcatagagtggcgctgatggaaaaaggaagtccctgcagcagtccccgcactctttaagcagctgtttaccgaaggcaccagttcagccaggagtgaaatccggagaggagcaacgccagcctgggtcacagtccatcaaaccccatgagcccgaccactctcgctcttccttacattcccacgtcccccttctctcccaacccctcatatcagcaagggaaattaattaatgagatttgataaatcagtagatagaatgaggtccccattctgaaatatttagcagactggaaccaccacgcaagcctctgtagggggtggatggagacacttctaactttaataaactgcgactgaacgtggaatcctagaaaaa

SEQ ID NO: 1191 - DNA, 1930 bp, Homo sapiens
ctaattggcagaatctctgacctccactttctctgactcccttctcccttcctagaaacagtatccacagtggactccggggctcctacagacttggcacagcttcctacagtcttgaaacagccctgttgttctgtcatggccagtgggcagtttgtgaacaaactgcaagaggaagtgatctgccccatctgcctggacattctgcagaaacctgtcaccatcgactgtgggcacaatttctgcctcaaatgcatcactcagattggggaaacatcatgtggatttttcaaatgtcccctctgcaaaacttccgtaaggaagaacgcaatcagttcctctgttttgtgtgtcgtgaatccaaggaccacaaatcccataatgtcagcttgatcgaagaagctgcccagaattatcaggggcagattcaagagcagatccaagtcttgcagcaaaaggagaaggagacagtacaagtgaaggcacaaggtgtacacagggtcgatgtcttcacggaccaggtagaacatgagaagcaaaggatcctcacagaatttgaactcctgcatcaagtcctagaggaggagaagaatttcctgctatcacggatttactggctgggtcatgagggaacggaagcggggaaacactatgttgcctccactgagccacagttgaacgatctcaagaagctcgttgattccctgaagaccaagcagaacatgccacccaggcagctgctggaggatatcaaagtcgtcttgtgcagaagtgaagagtttcagtttctcaacccaacccctgttcctctggaactggagaaaaaactcagtgaagcaaaatcaagacacgactccatcacagggagcctgaaaaaattcaaagaccaactccaggctgataggaaaaaagatgaaaacagattcttcaaaagcatgaataaaaatgacatgaagagctggggcttgttacagaaaaataatcataaaatgaacaaaacctcagagcccgggtcatcttctgcaggcggcagaactacatcggggccaccaaatcaccactcttcagccccatcccactccctgtttcgggcctcgtctgctgggaaagtcacttttccagtatgtctcctggcctcttatgatgagatttctggtcaaggagcgagctctcaggatacgaagacatttgacgttgcgctgtccgaggagctccatgcggcactgagtgagtggctgacagcgatccgggcttggttttgtgaggttccttcaagctaagccagctcagagaacacggggagcggtggtgctacacggacttcggagcatagagtggcgctgagtgagtggctgagaccgaccacggttcttgacttagtggaattgggtcgaaggagtggagaatgggagggctcgggctactgagagtggagatgggggcgggggtggtggtgaagagagttggagaaggaatggacgagttcttgagcaaaaggaggggaagagacaatctccagccacccgccccacgcttgacttcttatcactttggctgtggtgccgcctagtggaaaaaggaagtccctgcagcagtccccgcactctttaagcagctgtttaccgaaggcaccagttcagccaggagtgaaatccggagaggagcaacgccagcctgggtcacagtccatcaaaccccatgagcccgaccactctcgctcttccttacattcccacgtcccccttctctcccaacccctcatatcagcaagggaaattaattaatgagatttgataaatcagtagatagaatgaggtccccattctgaaatatttagcagactggaaccaccacgcaagcctctgtagggggtggatggagacacttctaactttaataaactgcgactgaacgtggaatcctagaaaaa

SEQ ID NO: 1192 - DNA, 2919 bp, Homo sapiens
ctaattggcagaatctctgacctccactttctctgactcccttctcccttcctagaaacagtatccacagtggactccggggctcctacagacttggcacagcttcctacagtcttgaaacagccctgttgttctgtcatggccagtgggcagtttgtgaacaaactgcaagaggaagtgatctgccccatctgcctggacattctgcagaaacctgtcaccatcgactgtgggcacaatttctgcctcaaatgcatcactcagattggggaaacatcatgtggatttttcaaatgtcccctctgcaaaacttccgtaaggaagaacgcaatcaggttcaactcgctgttgcggaatctggtggagaaaatccaagctctacaagcctctgaggtgcagtccaaaaggaaagaggctacatgcccgaggcaccaggagatgttccactatttctgcgaggatgatgggaagttcctctgttttgtgtgtcgtgaatccaaggaccacaaatcccataatgtcagcttgatcgaagaagctgcccagaattatcaggggcagattcaagagcagatccaagtcttgcagcaaaaggagaaggagacagtacaagtgaaggcacaaggtgtacacagggtcgatgtcttcacggaccaggtagaacatgagaagcaaaggatcctcacagaatttgaactcctgcatcaagtcctagaggaggagaagaatttcctgctatcacggatttactggctgggtcatgagggaacggaagcggggaaacactatgttgcctccactgagccacagttgaacgatctcaagaagctcgttgattccctgaagaccaagcagaacatgccacccaggcagctgctggaggatatcaaagtcgtcttgtgcaggtatgatgggccaccccaaatgtattttgcctactgattcatccacatacaattctcagcgtatatccaaatgcagtcaacattcctctctcagaaatacccacccacctctaactctgcattcatacatttaggctgcagctggggaatgcctatgccaaccatattagcacgtggttggttgttaaagaaaccagctgttttctcagccttcctccttcttcagcacagattctactatttcctgaatgcccccttgctcaactgaatagctcctgggtcccctactctgtctccctgaccctgtttttttccctcctctctgtctccatctcccatcttcatttccatatctccctatgccctacctcactcctgccccatatccctagccctgactttctgactcccagctcactatcccttaaccgccaggtcttcttctttttttttttttttttggagatggagctttgctcttgttgctcaggctggagtgcagtggtgcaatctcagctcactgcaacctttgtctcccaggttcaagtgattctcctgcctcagcctcccaagtagctgagactacaggcgcttgccaccaagcctggctaattttcatatttttagtagagaccgggttttaccatgttggccaggctagtcttgaactcctgacctcaggtgatccacccgcctcagcctcccaaagtgctgggattacaggtgtgagccaccgctctcagttctacccccaggtcttcatcccctcatttctcaaccccatatctcagatcctccttctcccacacctcatcccctgatctcaccaaccagctcaaccacatcttcctagaagtgaagagtttcagtttctcaacccaacccctgttcctctggaactggagaaaaaactcagtgaagcaaaatcaagacacgactccatcacagggagcctgaaaaaattcaaagaccaactccaggctgataggaaaaaagatgaaaacagattcttcaaaagcatgaataaaaatgacatgaagagctggggcttgttacagaaaaataatcataaaatgaacaaaacctcagagcccgggtcatcttctgcaggcggcagaactacatcggggccaccaaatcaccactcttcagccccatcccactccctgtttcgggcctcgtctgctgggaaagtcacttttccagtatgtctcctggcctcttatgatgagatttctggtcaaggagcgagctctcaggatacgaagacatttgacgttgcgctgtccgaggagctccatgcggcactgagtgagtggctgacagcgatccgggcttggttttgtgaggttccttcaagctaagccagctcagagaacacggggagcggtggtgctacacggacttcggagcatagagtggcgctgagtgagtggctgagaccgaccacggttcttgacttagtggaattgggtcgaaggagtggagaatgggagggctcgggctactgagagtggagatgggggcgggggtggtggtgaagagagttggagaaggaatggacgagttcttgagcaaaaggaggggaagagacaatctccagccacccgccccacgcttgacttcttatcactttggctgtggtgccgcctagtggaaaaaggaagtccctgcagcagtccccgcactctttaagcagctgtttaccgaaggcaccagttcagccaggagtgaaatccggagaggagcaacgccagcctgggtcacagtccatcaaaccccatgagcccgaccactctcgctcttccttacattcccacgtcccccttctctcccaacccctcatatcagcaagggaaattaattaatgagatttgataaatcagtagatagaatgaggtccccattctgaaatatttagcagactggaaccaccacgcaagcctctgtagggggtggatggagacacttctaactttaataaactgcgactgaacgtggaatcctagaaaaa

SEQ ID NO: 1193 - DNA, 1620 bp, Homo sapiens
gagaatggaaaggatgtgaaaatttgactcagaaggtttgggctcaagcccagtcttgtgagtttactgtacaacctgcaaggaatcactttacctctctgagcctcaggggcagattcaagagcagatccaagtcttgcagcaaaaggagaaggagacagtacaagtgaaggcacaaggtgtacacagggtcgatgtcttcacggaccaggtagaacatgagaagcaaaggatcctcacagaatttgaactcctgcatcaagtcctagaggaggagaagaatttcctgctatcacggatttactggctgggtcatgagggaacggaagcggggaaacactatgttgcctccactgagccacagttgaacgatctcaagaagctcgttgattccctgaagaccaagcagaacatgccacccaggcagctgctggaggatatcaaagtcgtcttgtgcagaagtgaagagtttcagtttctcaacccaacccctgttcctctggaactggagaaaaaactcagtgaagcaaaatcaagacacgactccatcacagggagcctgaaaaaattcaaagaccaactccaggctgataggaaaaaagatgaaaacagattcttcaaaagcatgaataaaaatgacatgaagagctggggcttgttacagaaaaataatcataaaatgaacaaaacctcagagcccgggtcatcttctgcaggcggcagaactacatcggggccaccaaatcaccactcttcagccccatcccactccctgtttcgggcctcgtctgctgggaaagtcacttttccagtatgtctcctggcctcttatgatgagatttctggtcaaggagcgagctctcaggatacgaagacatttgacgttgcgctgtccgaggagctccatgcggcactgagtgagtggctgacagcgatccgggcttggttttgtgaggttccttcaagctaagccagctcagagaacacggggagcggtggtgctacacggacttcggagcatagagtggcgctgagtgagtggctgagaccgaccacggttcttgacttagtggaattgggtcgaaggagtggagaatgggagggctcgggctactgagagtggagatgggggcgggggtggtggtgaagagagttggagaaggaatggacgagttcttgagcaaaaggaggggaagagacaatctccagccacccgccccacgcttgacttcttatcactttggctgtggtgccgcctagtggaaaaaggaagtccctgcagcagtccccgcactctttaagcagctgtttaccgaaggcaccagttcagccaggagtgaaatccggagaggagcaacgccagcctgggtcacagtccatcaaaccccatgagcccgaccactctcgctcttccttacattcccacgtcccccttctctcccaacccctcatatcagcaagggaaattaattaatgagatttgataaatcagtagatagaatgaggtccccattctgaaatatttagcagactggaaccaccacgcaagcctctgtagggggtggatggagacacttctaactttaataaactgcgactgaacgtggaatcctagaaaaa

SEQ ID NO: 1194 - DNA, 1950 bp, Homo sapiens
ctaattggcagaatctctgacctccactttctctgactcccttctcccttcctagaaacagtatccacagtggactccggggctcctacagacttggcacagcttcctacagtcttgaaacagccctgttgttctgtcatggccagtgggcagtttgtgaacaaactgcaagaggaagtgatctgccccatctgcctggacattctgcagaaacctgtcaccatcgactgtgggcacaatttctgcctcaaatgcatcactcagattggggaaacatcatgtggatttttcaaatgtcccctctgcaaaacttccgtaaggaagaacgcaatcaggttcaactcgctgttgcggaatctggtggagaaaatccaagctctacaagcctctgaggtgcagtccaaaaggaaagaggctacatgcccgaggcaccaggagatgttccactatttctgcgaggatgatgggaagttcctctgttttgtgtgtcgtgaatccaaggaccacaaatcccataatgtcagcttgatcgaagaagctgcccagaattatcaggggcagattcaagagcagatccaagtcttgcagcaaaaggagaaggagacagtacaagtgaaggcacaaggtgtacacagggtcgatgtcttcacggaccaggtagaacatgagaagcaaaggatcctcacagaatttgaactcctgcatcaagtcctagaggaggagaagaatttcctgctatcacggatttactggctgggtcatgagggaacggaagcggggaaacactatgttgcctccactgagccacagttgaacgatctcaagaagctcgttgattccctgaagaccaagcagaacatgccacccaggcagctgctggaggatatcaaagtcgtcttgtgcagaccaactccaggctgataggaaaaaagatgaaaacagattcttcaaaagcatgaataaaaatgacatgaagagctggggcttgttacagaaaaataatcataaaatgaacaaaacctcagagcccgggtcatcttctgcaggcggcagaactacatcggggccaccaaatcaccactcttcagccccatcccactccctgtttcgggcctcgtctgctgggaaagtcacttttccagtatgtctcctggcctcttatgatgagatttctggtcaaggagcgagctctcaggatacgaagacatttgacgttgcgctgtccgaggagctccatgcggcactgagtgagtggctgacagcgatccgggcttggttttgtgaggttccttcaagctaagccagctcagagaacacggggagcggtggtgctacacggacttcggagcatagagtggcgctgagtgagtggctgagaccgaccacggttcttgacttagtggaattgggtcgaaggagtggagaatgggagggctcgggctactgagagtggagatgggggcgggggtggtggtgaagagagttggagaaggaatggacgagttcttgagcaaaaggaggggaagagacaatctccagccacccgccccacgcttgacttcttatcactttggctgtggtgccgcctagtggaaaaaggaagtccctgcagcagtccccgcactctttaagcagctgtttaccgaaggcaccagttcagccaggagtgaaatccggagaggagcaacgccagcctgggtcacagtccatcaaaccccatgagcccgaccactctcgctcttccttacattcccacgtcccccttctctcccaacccctcatatcagcaagggaaattaattaatgagatttgataaatcagtagatagaatgaggtccccattctgaaatatttagcagactggaaccaccacgcaagcctctgtagggggtggatggagacacttctaactttaataaactgcgactgaacgtggaatcctagaaaaa

SEQ ID NO: 1195 - DNA, 2128 bp, Homo sapiens
ctaattggcagaatctctgacctccactttctctgactcccttctcccttcctagaaacagtatccacagtggactccggggctcctacagacttggcacagcttcctacagtcttgaaacagccctgttgttctgtcatggccagtgggcagtttgtgaacaaactgcaagaggaagtgatctgccccatctgcctggacattctgcagaaacctgtcaccatcgactgtgggcacaatttctgcctcaaatgcatcactcagattggggaaacatcatgtggatttttcaaatgtcccctctgcaaaacttccgtaaggaagaacgcaatcaggttcaactcgctgttgcggaatctggtggagaaaatccaagctctacaagcctctgaggtgcagtccaaaaggaaagaggctacatgcccgaggcaccaggagatgttccactatttctgcgaggatgatgggaagttcctctgttttgtgtgtcgtgaatccaaggaccacaaatcccataatgtcagcttgatcgaagaagctgcccagaattatcaggggcagattcaagagcagatccaagtcttgcagcaaaaggagaaggagacagtacaagtgaaggcacaaggtgtacacagggtcgatgtcttcacggaccaggtagaacatgagaagcaaaggatcctcacagaatttgaactcctgcatcaagtcctagaggaggagaagaatttcctgctatcacggatttactggctgggtcatgagggaacggaagcggggaaacactatgttgcctccactgagccacagttgaacgatctcaagaagctcgttgattccctgaagaccaagcagaacatgccacccaggcagctgctggaggatatcaaagtcgtcttgtgcagatcctccttctcccacacctcatcccctgatctcaccaaccagctcaaccacatcttcctagaagtgaagagtttcagtttctcaacccaacccctgttcctctggaactggagaaaaaactcagtgaagcaaaatcaagacacgactccatcacagggagcctgaaaaaattcaaagaccaactccaggctgataggaaaaaagatgaaaacagattcttcaaaagcatgaataaaaatgacatgaagagctggggcttgttacagaaaaataatcataaaatgaacaaaacctcagagcccgggtcatcttctgcaggcggcagaactacatcggggccaccaaatcaccactcttcagccccatcccactccctgtttcgggcctcgtctgctgggaaagtcacttttccagtatgtctcctggcctcttatgatgagatttctggtcaaggagcgagctctcaggatacgaagacatttgacgttgcgctgtccgaggagctccatgcggcactgagtgagtggctgacagcgatccgggcttggttttgtgaggttccttcaagctaagccagctcagagaacacggggagcggtggtgctacacggacttcggagcatagagtggcgctgagtgagtggctgagaccgaccacggttcttgacttagtggaattgggtcgaaggagtggagaatgggagggctcgggctactgagagtggagatgggggcgggggtggtggtgaagagagttggagaaggaatggacgagttcttgagcaaaaggaggggaagagacaatctccagccacccgccccacgcttgacttcttatcactttggctgtggtgccgcctagtggaaaaaggaagtccctgcagcagtccccgcactctttaagcagctgtttaccgaaggcaccagttcagccaggagtgaaatccggagaggagcaacgccagcctgggtcacagtccatcaaaccccatgagcccgaccactctcgctcttccttacattcccacgtcccccttctctcccaacccctcatatcagcaagggaaattaattaatgagatttgataaatcagtagatagaatgaggtccccattctgaaatatttagcagactggaaccaccacgcaagcctctgtagggggtggatggagacacttctaactttaataaactgcgactgaacgtggaatcctagaaaaa

SEQ ID NO: 1196 - DNA, 2378 bp, Homo sapiens
ctaattggcagaatctctgacctccactttctctgactcccttctcccttcctagaaacagtatccacagtggactccggggctcctacagacttggcacagcttcctacagtcttgaaacagccctgttgttctgtcatggccagtgggcagtttgtgaacaaactgcaagaggaagtgatctgccccatctgcctggacattctgcagaaacctgtcaccatcgactgtgggcacaatttctgcctcaaatgcatcactcagattggggaaacatcatgtggatttttcaaatgtcccctctgcaaaacttccgtaaggaagaacgcaatcaggttcaactcgctgttgcggaatctggtggagaaaatccaagctctacaagcctctgaggtgcagtccaaaaggaaagaggctacatgcccgaggcaccaggagatgttccactatttctgcgaggatgatgggaagttcctctgttttgtgtgtcgtgaatccaaggaccacaaatcccataatgtcagcttgatcgaagaagctgcccagaattatcaggggcagattcaagagcagatccaagtcttgcagcaaaaggagaaggagacagtacaagtgaaggcacaaggtgtacacagggtcgatgtcttcacggaccaggtagaacatgagaagcaaaggatcctcacagaatttgaactcctgcatcaagtcctagaggaggagaagaatttcctgctatcacggatttactggctgggtcatgagggaacggaagcggggaaacactatgttgcctccactgagccacagttgaacgatctcaagaagctcgttgattccctgaagaccaagcagaacatgccacccaggcagctgctggaggatatcaaagtcgtcttgtgcagaagtgaagagtttcagtttctcaacccaacccctgttcctctggaactggagaaaaaactcagtgaagcaaaatcaagacacgactccatcacagggagcctgaaaaaattcaaagaccaactccaggctgataggaaaaaagatgaaaacagattcttcaaaagcatgaataaaaatgacatgaagagctggggcttgttacagaaaaataatcataaaatgaacaaaacctcagagcccgggtcatcttctgcaggtaagagtcctgtctctgaatactaagggacctctaagtctacaggtggtcaaaatgctgtatccacccaattccactaaatggaataaatgaataaatgaatgaattcatttattccatttcctcagttcctccccaaattacacctctgccaggaaacagagggcgctccgacttgttcaggtgtactttcttgagtttcacctccatccctcctgctgtatgtagagctcagctgtgctgtctggcaatggaggattgctgccgaggtgctcccgctgacctcttttctcctttccttctcccgcaaaggcggcagaactacatcggggccaccaaatcaccactcttcagccccatcccactccctgtttcgggcctcgtctgctgggaaagtcacttttccagtatgtctcctggcctcttatgatgagatttctggtcaaggagcgagctctcaggatacgaagacatttgacgttgcgctgtccgaggagctccatgcggcactgagtgagtggctgacagcgatccgggcttggttttgtgaggttccttcaagctaagccagctcagagaacacggggagcggtggtgctacacggacttcggagcatagagtggcgctgagtgagtggctgagaccgaccacggttcttgacttagtggaattgggtcgaaggagtggagaatgggagggctcgggctactgagagtggagatgggggcgggggtggtggtgaagagagttggagaaggaatggacgagttcttgagcaaaaggaggggaagagacaatctccagccacccgccccacgcttgacttcttatcactttggctgtggtgccgcctagtggaaaaaggaagtccctgcagcagtccccgcactctttaagcagctgtttaccgaaggcaccagttcagccaggagtgaaatccggagaggagcaacgccagcctgggtcacagtccatcaaaccccatgagcccgaccactctcgctcttccttacattcccacgtcccccttctctcccaacccctcatatcagcaagggaaattaattaatgagatttgataaatcagtagatagaatgaggtccccattctgaaatatttagcagactggaaccaccacgcaagcctctgtagggggtggatggagacacttctaactttaataaactgcgactgaacgtggaatcctagaaaaa

SEQ ID NO: 1197 - DNA, 2022 bp, Homo sapiens
ctaattggcagaatctctgacctccactttctctgactcccttctcccttcctagaaacagtatccacagtggactccggggctcctacagacttggcacagcttcctacagtcttgaaacagccctgttgttctgtcatggccagtgggcagtttgtgaacaaactgcaagaggaagtgatctgccccatctgcctggacattctgcagaaacctgtcaccatcgactgtgggcacaatttctgcctcaaatgcatcactcagattggggaaacatcatgtggatttttcaaatgtcccctctgcaaaacttccgtaaggaagaacgcaatcaggttcaactcgctgttgcggaatctggtggagaaaatccaagctctacaagcctctgaggtgcagtccaaaaggaaagaggctacatgcccgaggcaccaggagatgttccactatttctgcgaggatgatgggaagttcctctgttttgtgtgtcgtgaatccaaggaccacaaatcccataatgtcagcttgatcgaagaagctgcccagaattatcaggggcagattcaagagcagatccaagtcttgcagcaaaaggagaaggagacagtacaagtgaaggcacaaggtgtacacagggtcgatgtcttcacggaccaggtagaacatgagaagcaaaggatcctcacagaatttgaactcctgcatcaagtcctagaggaggagaagaatttcctgctatcacggatttactggctgggtcatgagggaacggaagcggggaaacactatgttgcctccactgagccacagttgaacgatctcaagaagctcgttgattccctgaagaccaagcagaacatgccacccaggcagctgctggaggatatcaaagtcgtcttgtgcagaactggagaaaaaactcagtgaagcaaaatcaagacacgactccatcacagggagcctgaaaaaattcaaagaccaactccaggctgataggaaaaaagatgaaaacagattcttcaaaagcatgaataaaaatgacatgaagagctggggcttgttacagaaaaataatcataaaatgaacaaaacctcagagcccgggtcatcttctgcaggcggcagaactacatcggggccaccaaatcaccactcttcagccccatcccactccctgtttcgggcctcgtctgctgggaaagtcacttttccagtatgtctcctggcctcttatgatgagatttctggtcaaggagcgagctctcaggatacgaagacatttgacgttgcgctgtccgaggagctccatgcggcactgagtgagtggctgacagcgatccgggcttggttttgtgaggttccttcaagctaagccagctcagagaacacggggagcggtggtgctacacggacttcggagcatagagtggcgctgagtgagtggctgagaccgaccacggttcttgacttagtggaattgggtcgaaggagtggagaatgggagggctcgggctactgagagtggagatgggggcgggggtggtggtgaagagagttggagaaggaatggacgagttcttgagcaaaaggaggggaagagacaatctccagccacccgccccacgcttgacttcttatcactttggctgtggtgccgcctagtggaaaaaggaagtccctgcagcagtccccgcactctttaagcagctgtttaccgaaggcaccagttcagccaggagtgaaatccggagaggagcaacgccagcctgggtcacagtccatcaaaccccatgagcccgaccactctcgctcttccttacattcccacgtcccccttctctcccaacccctcatatcagcaagggaaattaattaatgagatttgataaatcagtagatagaatgaggtccccattctgaaatatttagcagactggaaccaccacgcaagcctctgtagggggtggatggagacacttctaactttaataaactgcgactgaacgtggaatcctagaaaaa

SEQ ID NO: 1198 - DNA, 1971 bp, Homo sapiens
tctagaggatccgccaagaggtagaagaaacagtatccacagtggactccggggctcctacagacttggcacagcttcctacagtcttgaaacagccctgttgttctgtcatggccagtgggcagtttgtgaacaaactgcaagaggaagtgatctgccccatctgcctggacattctgcagaaacctgtcaccatcgactgtgggcacaatttctgcctcaaatgcatcactcagattggggaaacatcatgtggatttttcaaatgtcccctctgcaaaacttccgtaaggaagaacgcaatcaggttcaactcgctgttgcggaatctggtggagaaaatccaagctctacaagcctctgaggtgcagtccaaaaggaaagaggctacatgcccgaggcaccaggagatgttccactatttctgcgaggatgatgggaagttcctctgttttgtgtgtcgtgaatccaaggaccacaaatcccataatgtcagcttgatcgaagaagctgcccagaattatcaggggcagattcaagagcagatccaagtcttgcagcaaaaggagaaggagacagtacaagtgaaggcacaaggtgtacacagggtcgatgtcttcacggaccaggtagaacatgagaagcaaaggatcctcacagaatttgaactcctgcatcaagtcctagaggaggagaagaatttcctgctatcacggatttactggctgggtcatgagggaacggaagcggggaaacactatgttgcctccactgagccacagttgaacgatctcaagaagctcgttgattccctgaagaccaagcagaacatgccacccaggcagctgctggagaactggagaaaaaactcagtgaagcaaaatcaagacacgactccatcacagggagcctgaaaaaattcaaagaccaactccaggctgataggaaaaaagatgaaaacagattcttcaaaagcatgaataaaaatgacatgaagagctggggcttgttacagaaaaataatcataaaatgaacaaaacctcagagcccgggtcatcttctgcaggcggcagaactacatcggggccaccaaatcaccactcttcagccccatcccactccctgtttcgggcctcgtctgctgggaaagtcacttttccagtatgtctcctggcctcttatgatgagatttctggtcaaggagcgagctctcaggatacgaagacatttgacgttgcgctgtccgaggagctccatgcggcactgagtgagtggctgacagcgatccgggcttggttttgtgaggttccttcaagctaagccagctcagagaacacggggagcggtggtgctacacggacttcggagcatagagtggcgctgagtgagtggctgagaccgaccacggttcttgacttagtggaattgggtcgaaggagtggagaatgggagggctcgggctactgagagtggagatgggggcgggggtggtggtgaagagagttggagaaggaatggacgagttcttgagcaaaaggaggggaagagacaatctccagccacccgccccacgcttgacttcttatcactttggctgtggtgccgcctagtggaaaaaggaagtccctgcagcagtccccgcactctttaagcagctgtttaccgaaggcaccagttcagccaggagtgaaatccggagaggagcaacgccagcctgggtcacagtccatcaaaccccatgagcccgaccactctcgctcttccttacattcccacgtcccccttctctcccaacccctcatatcagcaagggaaattaattaatgagatttgataaatcagtagatagaatgaggtccccattctgaaatatttagcagactggaaccaccacgcaagcctctgtagggggtggatggagacacttctaactttaataaactgcgactgaacgtggaatcctagaaaaa

SEQ ID NO: 1199 - DNA, 3231 bp, Homo sapiens
ctaattggcagaatctctgacctccactttctctgactcccttctcccttcctagaaacagtatccacagtggactccggggctcctacagacttggcacagcttcctacagtcttgaaacagccctgttgttctgtcatggccagtgggcagtttgtgaacaaactgcaagaggaagtgatctgccccatctgcctggacattctgcagaaacctgtcaccatcgactgtgggcacaatttctgcctcaaatgcatcactcagattggggaaacatcatgtggatttttcaaatgtcccctctgcaaaacttccgtaaggaagaacgcaatcaggttcaactcgctgttgcggaatctggtggagaaaatccaagctctacaagcctctgaggtgcagtccaaaaggaaagaggctacatgcccgaggcaccaggagatgttccactatttctgcgaggatgatgggaagttcctctgttttgtgtgtcgtgaatccaaggaccacaaatcccataatgtcagcttgatcgaagaagctgcccagaattatcaggggcagattcaagagcagatccaagtcttgcagcaaaaggagaaggagacagtacaagtgaaggcacaaggtgtacacagggtcgatgtcttcacggaccaggtagaacatgagaagcaaaggatcctcacagaatttgaactcctgcatcaagtcctagaggaggagaagaatttcctgctatcacggatttactggctgggtcatgagggaacggaagcggggaaacactatgttgcctccactgagccacagttgaacgatctcaagaagctcgttgattccctgaagaccaagcagaacatgccacccaggcagctgctggaggatatcaaagtcgtcttgtgcaggtatgatgggccaccccaaatgtattttgcctactgattcatccacatacaattctcagcgtatatccaaatgcagtcaacattcctctctcagaaatacccacccacctctaactctgcattcatacatttaggctgcagctggggaatgcctatgccaaccatattagcacgtggttggttgttaaagaaaccagctgttttctcagccttcctccttcttcagcacagattctactatttcctgaatgcccccttgctcaactgaatagctcctgggtcccctactctgtctccctgaccctgtttttttccctcctctctgtctccatctcccatcttcatttccatatctccctatgccctacctcactcctgccccatatccctagccctgactttctgactcccagctcactatcccttaaccgccaggtcttcttctttttttttttttttttggagatggagctttgctcttgttgctcaggctggagtgcagtggtgcaatctcagctcactgcaacctttgtctcccaggttcaagtgattctcctgcctcagcctcccaagtagctgagactacaggcgcttgccaccaagcctggctaattttcatatttttagtagagaccgggttttaccatgttggccaggctagtcttgaactcctgacctcaggtgatccacccgcctcagcctcccaaagtgctgggattacaggtgtgagccaccgctctcagttctacccccaggtcttcatcccctcatttctcaaccccatatctcagatcctccttctcccacacctcatcccctgatctcaccaaccagctcaaccacatcttcctagaagtgaagagtttcagtttctcaacccaacccctgttcctctggaactggagaaaaaactcagtgaagcaaaatcaagacacgactccatcacagggagcctgaaaaaattcaaagaccaactccaggctgataggaaaaaagatgaaaacagattcttcaaaagcatgaataaaaatgacatgaagagctggggcttgttacagaaaaataatcataaaatgaacaaaacctcagagcccgggtcatcttctgcaggtaagagtcctgtctctgaatactaagggacctctaagtctacaggtggtcaaaatgctgtatccacccaattccactaaatggaataaatgaataaatgaatgaattcatttattccatttcctcagttcctccccaaattacacctctgccaggaaacagagggcgctccgacttgttcaggtgtactttcttgagtttcacctccatccctcctgctgtatgtagagctcagctgtgctgtctggcaatggaggattgctgccgaggtgctcccgctgacctcttttctcctttccttctcccgcaaaggcggcagaactacatcggggccaccaaatcaccactcttcagccccatcccactccctgtttcgggcctcgtctgctgggaaagtcacttttccagtatgtctcctggcctcttatgatgagatttctggtcaaggagcgagctctcaggatacgaagacatttgacgttgcgctgtccgaggagctccatgcggcactgagtgagtggctgacagcgatccgggcttggttttgtgaggttccttcaagctaagccagctcagagaacacggggagcggtggtgctacacggacttcggagcatagagtggcgctgagtgagtggctgagaccgaccacggttcttgacttagtggaattgggtcgaaggagtggagaatgggagggctcgggctactgagagtggagatgggggcgggggtggtggtgaagagagttggagaaggaatggacgagttcttgagcaaaaggaggggaagagacaatctccagccacccgccccacgcttgacttcttatcactttggctgtggtgccgcctagtggaaaaaggaagtccctgcagcagtccccgcactctttaagcagctgtttaccgaaggcaccagttcagccaggagtgaaatccggagaggagcaacgccagcctgggtcacagtccatcaaaccccatgagcccgaccactctcgctcttccttacattcccacgtcccccttctctcccaacccctcatatcagcaagggaaattaattaatgagatttgataaatcagtagatagaatgaggtccccattctgaaatatttagcagactggaaccaccacgcaagcctctgtagggggtggatggagacacttctaactttaataaactgcgactgaacgtggaatcctagaaaaa

SEQ ID NO: 1200 - DNA, 2039 bp, Homo sapiens
tctagaggatccgccaagaggtagaagaaacagtatccacagtggactccggggctcctacagacttggcacagcttcctacagtcttgaaacagccctgttgttctgtcatggccagtgggcagtttgtgaacaaactgcaagaggaagtgatctgccccatctgcctggacattctgcagaaacctgtcaccatcgactgtgggcacaatttctgcctcaaatgcatcactcagattggggaaacatcatgtggatttttcaaatgtcccctctgcaaaacttccgtaaggaagaacgcaatcaggttcaactcgctgttgcggaatctggtggagaaaatccaagctctacaagcctctgaggtgcagtccaaaaggaaagaggctacatgcccgaggcaccaggagatgttccactatttctgcgaggatgatgggaagttcctctgttttgtgtgtcgtgaatccaaggaccacaaatcccataatgtcagcttgatcgaagaagctgcccagaattatcaggggcagattcaagagcagatccaagtcttgcagcaaaaggagaaggagacagtacaagtgaaggcacaaggtgtacacagggtcgatgtcttcacggaccaggtagaacatgagaagcaaaggatcctcacagaatttgaactcctgcatcaagtcctagaggaggagaagaatttcctgctatcacggatttactggctgggtcatgagggaacggaagcggggaaacactatgttgcctccactgagccacagttgaacgatctcaagaagctcgttgattccctgaagaccaagcagaacatgccacccaggcagctgctggaggtatacaaagtcgtcttgtggcagaagtgaagagtttcagtttctcaacccaacccctgttcctctggaactggagaaaaaactcagtgaagcaaaatcaagacacgactccatcacagggagcctgaaaaaattcaaagaccaactccaggctgataggaaaaaagatgaaaacagattcttcaaaagcatgaataaaaatgacatgaagagctggggcttgttacagaaaaataatcataaaatgaacaaaacctcagagcccgggtcatcttctgcaggcggcagaactacatcggggccaccaaatcaccactcttcagccccatcccactccctgtttcgggcctcgtctgctgggaaagtcacttttccagtatgtctcctggcctcttatgatgagatttctggtcaaggagcgagctctcaggatacgaagacatttgacgttgcgctgtccgaggagctccatgcggcactgagtgagtggctgacagcgatccgggcttggttttgtgaggttccttcaagctaagccagctcagagaacacggggagcggtggtgctacacggacttcggagcatagagtggcgctgagtgagtggctgagaccgaccacggttcttgacttagtggaattgggtcgaaggagtggagaatgggagggctcgggctactgagagtggagatgggggcgggggtggtggtgaagagagttggagaaggaatggacgagttcttgagcaaaaggaggggaagagacaatctccagccacccgccccacgcttgacttcttatcactttggctgtggtgccgcctagtggaaaaaggaagtccctgcagcagtccccgcactctttaagcagctgtttaccgaaggcaccagttcagccaggagtgaaatccggagaggagcaacgccagcctgggtcacagtccatcaaaccccatgagcccgaccactctcgctcttccttacattcccacgtcccccttctctcccaacccctcatatcagcaagggaaattaattaatgagatttgataaatcagtagatagaatgaggtccccattctgaaatatttagcagactggaaccaccacgcaagcctctgtagggggtggatggagacacttctaactttaataaactgcgactgaacgtggaatcctagaaaaa

SEQ ID NO: 1201 - DNA, 2789 bp, Homo sapiens
acttccgcctcctaggcccaagtcccaagtagctgggattacaggtccccaccaccacgcccagctaatttttgtattcttagcagacacggggttttaccatgttggccaggatggtctcgaactcctgacctcaagtgatctgcccacctcagcctcccaaagtgctgggattacaggcgtgaaccaccgtgcctggcctctatttttaatttaaatttgaattagtaaaaatgaaattaaaaattcagttctttgtcacactagccacaatttccaatgttcagtagccacatgtggttggtggctaccatattggacagtgcaagtctagctggtgcttaaaacaagctgagatgattcctcctcaagtcatctattctcccacaggttcaaaaacctatttatttattttaagaaagatcatgcaaagccattctagcctttctcctgccctggctagcagggctcccttgttcagtctcagagccaaattcatcttctaaatctcactcttctcttcttcactcagttcttcttgaggtcaaaacacttttctgcttactggcagagcagtgcttcttggagaagcccttcgtggtggggagaggggaggaggatggggtaagagagacttggaggggttcttactcctcctgctctgccccacacccagcaggctctgtatctcctccttggctcctgggaatcagccaagtgctgaggctgtgctgtttctctttctcttctaggatatcaaagtcgtcttgtgcaggtatgatgggccaccccaaatgtattttgcctactgattcatccacatacaattctcagcgtatatccaaatgcagtcaacattcctctctcagaaatacccacccacctctaactctgcattcatacatttaggctgcagctggggaatgcctatgccaaccatattagcacgtggttggttgttaaagaaaccagctgttttctcagccttcctccttcttcagcacagattctactatttcctgaatgcccccttgctcaactgaatagctcctgggtcccctactctgtctccctgaccctgtttttttccctcctctctgtctccatctcccatcttcatttccatatctccctatgccctacctcactcctgccccatatccctagccctgactttctgactcccagctcactatcccttaaccgccaggtcttcttctttttttttttttttttggagatggagctttgctcttgttgctcaggctggagtgcagtggtgcaatctcagctcactgcaacctttgtctcccaggttcaagtgattctcctgcctcagcctcccaagtagctgagactacaggcgcttgccaccaagcctggctaattttcatatttttagtagagaccgggttttaccatgttggccaggctagtcttgaactcctgacctcaggtgatccacccgcctcagcctcccaaagtgctgggattacaggtgtgagccaccgctctcagttctacccccaggtcttcatcccctcatttctcaaccccatatctcagatcctccttctcccacacctcatcccctgatctcaccaaccagctcaaccacatcttcctagaagtgaagagtttcagtttctcaacccaacccctgttcctctggaactggagaaaaaactcagtgaagcaaaatcaagacacgactccatcacagggagcctgaaaaaattcaaagaccaactccaggctgataggaaaaaagatgaaaacagattcttcaaaagcatgaataaaaatgacatgaagagctggggcttgttacagaaaaataatcataaaatgaacaaaacctcagagcccgggtcatcttctgcaggcggcagaactacatcggggccaccaaatcaccactcttcagccccatcccactccctgtttcgggcctcgtctgctgggaaagtcacttttccagtatgtctcctggcctcttatgatgagatttctggtcaaggagcgagctctcaggatacgaagacatttgacgttgcgctgtccgaggagctccatgcggcactgagtgagtggctgacagcgatccgggcttggttttgtgaggttccttcaagctaagccagctcagagaacacggggagcggtggtgctacacggacttcggagcatagagtggcgctgagtgagtggctgagaccgaccacggttcttgacttagtggaattgggtcgaaggagtggagaatgggagggctcgggctactgagagtggagatgggggcgggggtggtggtgaagagagttggagaaggaatggacgagttcttgagcaaaaggaggggaagagacaatctccagccacccgccccacgcttgacttcttatcactttggctgtggtgccgcctagtggaaaaaggaagtccctgcagcagtccccgcactctttaagcagctgtttaccgaaggcaccagttcagccaggagtgaaatccggagaggagcaacgccagcctgggtcacagtccatcaaaccccatgagcccgaccactctcgctcttccttacattcccacgtcccccttctctcccaacccctcatatcagcaagggaaattaattaatgagatttgataaatcagtagatagaatgaggtccccattctgaaatatttagcagactggaaccaccacgcaagcctctgtagggggtggatggagacacttctaactttaataaactgcgactgaacgtggaatcctagaaaaa

SEQ ID NO: 1202 - DNA, 1465 bp, Homo sapiens
agattgagtgtaaaaagagactgtaaaagatagcaataatttttataatacatgttgaaataacattttgagaatattgagttaaataaaatatataattaaagttaattttactagtttctttctactttttaaatgtgactactagaaaatttaaaaatatataagtggctcacattcatgactcagattacattcatcattcatactggacagtgctgggctaggcagtcaccacaggaaagcagaaagggcatctctcaagggttgcataccttcctggtccaataagaatatgagagtcaaatgcagcttctacttctcccaggcatttcaaattagtgccttgctgtgtgatagtgagttctttgctcaacccctctggactctcaccatttcatcccattctttattccccagaccaactccaggctgataggaaaaaagatgaaaacagattcttcaaaagcatgaataaaaatgacatgaagagctggggcttgttacagaaaaataatcataaaatgaacaaaacctcagagcccgggtcatcttctgcaggcggcagaactacatcggggccaccaaatcaccactcttcagccccatcccactccctgtttcgggcctcgtctgctgggaaagtcacttttccagtatgtctcctggcctcttatgatgagatttctggtcaaggagcgagctctcaggatacgaagacatttgacgttgcgctgtccgaggagctccatgcggcactgagtgagtggctgacagcgatccgggcttggttttgtgaggttccttcaagctaagccagctcagagaacacggggagcggtggtgctacacggacttcggagcatagagtggcgctgagtgagtggctgagaccgaccacggttcttgacttagtggaattgggtcgaaggagtggagaatgggagggctcgggctactgagagtggagatgggggcgggggtggtggtgaagagagttggagaaggaatggacgagttcttgagcaaaaggaggggaagagacaatctccagccacccgccccacgcttgacttcttatcactttggctgtggtgccgcctagtggaaaaaggaagtccctgcagcagtccccgcactctttaagcagctgtttaccgaaggcaccagttcagccaggagtgaaatccggagaggagcaacgccagcctgggtcacagtccatcaaaccccatgagcccgaccactctcgctcttccttacattcccacgtcccccttctctcccaacccctcatatcagcaagggaaattaattaatgagatttgataaatcagtagatagaatgaggtccccattctgaaatatttagcagactggaaccaccacgcaagcctctgtagggggtggatggagacacttctaactttaataaactgcgactgaacgtggaatcctagaaaaa

SEQ ID NO: 1203 - DNA, 1703 bp, Homo sapiens
ccaggtcatatgatcattaagtgaaagagagagaattagaactcctttctccaaagccagaaactacagaatgcattccaaagccagagagcaggatttagggatcctattccaccagcatttctccacaaaaggagctaccggtgtttagaaaggccatctttgttatgctccatgacttttgccctgttaaatgcttagtatcccaggccccagaaagccctataagccagtagagaaccacactcttgttgtcactgagacaacctgaaaggtttccacacttccccctgggtggggaatgggtcccactgagaaccattgactgttctgattgatgatggcagggtgcttgtttttgtttttaatttgcagcttctggttatcaagaccaaataggttttctctccccaatttttagggggcttgttacagaaaaataatcataaaatgaacaaaacctcagagcccgggtcatcttctgcaggtaagagtcctgtctctgaatactaagggacctctaagtctacaggtggtcaaaatgctgtatccacccaattccactaaatggaataaatgaataaatgaatgaattcatttattccatttcctcagttcctccccaaattacacctctgccaggaaacagagggcgctccgacttgttcaggtgtactttcttgagtttcacctccatccctcctgctgtatgtagagctcagctgtgctgtctggcaatggaggattgctgccgaggtgctcccgctgacctcttttctcctttccttctcccgcaaaggcggcagaactacatcggggccaccaaatcaccactcttcagccccatcccactccctgtttcgggcctcgtctgctgggaaagtcacttttccagtatgtctcctggcctcttatgatgagatttctggtcaaggagcgagctctcaggatacgaagacatttgacgttgcgctgtccgaggagctccatgcggcactgagtgagtggctgacagcgatccgggcttggttttgtgaggttccttcaagctaagccagctcagagaacacggggagcggtggtgctacacggacttcggagcatagagtggcgctgagtgagtggctgagaccgaccacggttcttgacttagtggaattgggtcgaaggagtggagaatgggagggctcgggctactgagagtggagatgggggcgggggtggtggtgaagagagttggagaaggaatggacgagttcttgagcaaaaggaggggaagagacaatctccagccacccgccccacgcttgacttcttatcactttggctgtggtgccgcctagtggaaaaaggaagtccctgcagcagtccccgcactctttaagcagctgtttaccgaaggcaccagttcagccaggagtgaaatccggagaggagcaacgccagcctgggtcacagtccatcaaaccccatgagcccgaccactctcgctcttccttacattcccacgtcccccttctctcccaacccctcatatcagcaagggaaattaattaatgagatttgataaatcagtagatagaatgaggtccccattctgaaatatttagcagactggaaccaccacgcaagcctctgtagggggtggatggagacacttctaactttaataaactgcgactgaacgtggaatcctagaaaaa

SEQ ID NO: 1204 - DNA, 1473 bp, Homo sapiens
ctaattggcagaatctctgacctccactttctctgactcccttctcccttcctagaaacagtatccacagtggactccggggctcctacagacttggcacagcttcctacagtcttgaaacagccctgttgttctgtcatggccagtgggcagtttgtgaacaaactgcaagaggaagtgatctgccccatctgcctggacattctgcagaaacctgtcaccatcgactgtgggcacaatttctgcctcaaatgcatcactcagattggggaaacatcatgtggatttttcaaatgtcccctctgcaaaacttccgtaaggaagaacgcaatcaggttcaactcgctgttgcggaatctggtggagaaaatccaagctctacaagcctctgaggtgcagtccaaaaggaaagaggctacatgcccgaggcaccaggagatgttccactatttctgcgaggatgatgggaagttcctctgttttgtgtgtcgtgaatccaaggaccacaaatcccataatgtcagcttgatcgaagaagctgcccagaattatcaggggcagattcaagagcagatccaagtcttgcagcaaaaggagaaggagacagtacaagtgaaggcacaaggtgtacacagggtcgatgtcttcacggaccaggtagaacatgagaagcaaaggatcctcacagaatttgaactcctgcatcaagtcctagaggaggagaagaatttcctgctatcacggatttactggctgggtcatgagggaacggaagcggggaaacactatgttgcctccactgagccacagttgaacgatctcaagaagctcgttgattccctgaagaccaagcagaacatgccacccaggcagctgctggaggatatcaaagtcgtcttgtgcagaagtgaagagtttcagtttctcaacccaacccctgttcctctggaactggagaaaaaactcagtgaagcaaaatcaagacacgactccatcacagggagcctgaaaaaattcaaagaccaactccaggctgataggaaaaaagatgaaaacagattcttcaaaagcatgaataaaaatgacatgaagagctgtaagtgagaaatgatggttggttgcttctgccatttggggaaagtgagaaaaggggaagaattgtgtctctatgattacatgaaggccagatataagtgaatgccgattcctcagccaattgagagaacaggcatatggttgttttattattttaaactcaggtaactcacaaaacagtcactaatcccaaactttgaagtattcagaagtaatagaaaattacaaatgtatttcttcactcctagagacagggaggaaaaagtgggacaagaaggaggcagctccacctctgtagtatttgctgcccctacagggcaccaggtttcgaggcaaactcctctgggtgtgaggtcagtacagctcaggggatggaga

SEQ ID NO: 1205 - DNA, 1777 bp, Homo sapiens
agattgagtgtaaaaagagactgtaaaagatagcaataatttttataatacatgttgaaataacattttgagaatattgagttaaataaaatatataattaaagttaattttactagtttctttctactttttaaatgtgactactagaaaatttaaaaatatataagtggctcacattcatgactcagattacattcatcattcatactggacagtgctgggctaggcagtcaccacaggaaagcagaaagggcatctctcaagggttgcataccttcctggtccaataagaatatgagagtcaaatgcagcttctacttctcccaggcatttcaaattagtgccttgctgtgtgatagtgagttctttgctcaacccctctggactctcaccatttcatcccattctttattccccagaccaactccaggctgataggaaaaaagatgaaaacagattcttcaaaagcatgaataaaaatgacatgaagagctggggcttgttacagaaaaataatcataaaatgaacaaaacctcagagcccgggtcatcttctgcaggtaagagtcctgtctctgaatactaagggacctctaagtctacaggtggtcaaaatgctgtatccacccaattccactaaatggaataaatgaataaatgaatgaattcatttattccatttcctcagttcctccccaaattacacctctgccaggaaacagagggcgctccgacttgttcaggtgtactttcttgagtttcacctccatccctcctgctgtatgtagagctcagctgtgctgtctggcaatggaggattgctgccgaggtgctcccgctgacctcttttctcctttccttctcccgcaaaggcggcagaactacatcggggccaccaaatcaccactcttcagccccatcccactccctgtttcgggcctcgtctgctgggaaagtcacttttccagtatgtctcctggcctcttatgatgagatttctggtcaaggagcgagctctcaggatacgaagacatttgacgttgcgctgtccgaggagctccatgcggcactgagtgagtggctgacagcgatccgggcttggttttgtgaggttccttcaagctaagccagctcagagaacacggggagcggtggtgctacacggacttcggagcatagagtggcgctgagtgagtggctgagaccgaccacggttcttgacttagtggaattgggtcgaaggagtggagaatgggagggctcgggctactgagagtggagatgggggcgggggtggtggtgaagagagttggagaaggaatggacgagttcttgagcaaaaggaggggaagagacaatctccagccacccgccccacgcttgacttcttatcactttggctgtggtgccgcctagtggaaaaaggaagtccctgcagcagtccccgcactctttaagcagctgtttaccgaaggcaccagttcagccaggagtgaaatccggagaggagcaacgccagcctgggtcacagtccatcaaaccccatgagcccgaccactctcgctcttccttacattcccacgtcccccttctctcccaacccctcatatcagcaagggaaattaattaatgagatttgataaatcagtagatagaatgaggtccccattctgaaatatttagcagactggaaccaccacgcaagcctctgtagggggtggatggagacacttctaactttaataaactgcgactgaacgtggaatcctagaaaaa

SEQ ID NO: 1206 - DNA, 1239 bp, Homo sapiens
agattgagtgtaaaaagagactgtaaaagatagcaataatttttataatacatgttgaaataacattttgagaatattgagttaaataaaatatataattaaagttaattttactagtttctttctactttttaaatgtgactactagaaaatttaaaaatatataagtggctcacattcatgactcagattacattcatcattcatactggacagtgctgggctaggcagtcaccacaggaaagcagaaagggcatctctcaagggttgcataccttcctggtccaataagaatatgagagtcaaatgcagcttctacttctcccaggcatttcaaattagtgccttgctgtgtgatagtgagttctttgctcaacccctctggactctcaccatttcatcccattctttattccccagaccaactccaggctgataggaaaaaagatgaaaacagattcttcaaaagcatgaataaaaatgacatgaagagctggggcttgttacagaaaaataatcataaaatgaacaaaacctcagagcccgggtcatcttctgcaggcggcagaactacatcggggccaccaaatcaccactcttcagccccatcccactccctgtttcgggcctcgtctgctgggaaagtcacttttccagtatgtctcctggcctcttatgatgagatttctggtcaaggagcgagctctcaggatacgaagacatttgacgttgcgctgtccgaggagctccatgcggcactgagtgagtggctgacagcgatccgggcttggttttgtgaggttccttcaagctaagccagctcagagaacacggggagcggtggtgctacacggacttcggagcatagagtggcgctgatggaaaaaggaagtccctgcagcagtccccgcactctttaagcagctgtttaccgaaggcaccagttcagccaggagtgaaatccggagaggagcaacgccagcctgggtcacagtccatcaaaccccatgagcccgaccactctcgctcttccttacattcccacgtcccccttctctcccaacccctcatatcagcaagggaaattaattaatgagatttgataaatcagtagatagaatgaggtccccattctgaaatatttagcagactggaaccaccacgcaagcctctgtagggggtggatggagacacttctaactttaataaactgcgactgaacgtggaatcctagaaaaa

SEQ ID NO: 1207 - DNA, 2264 bp, Homo sapiens
aacgttccccaaccaccgtccgagctgccccactcttcgcccggtcactgatgcagaggctgtcaggcctctctgcgcacgaaacccatcacagcacctgggccagcagccagtgccgggctgtcctcttcccaccccaaggcggtcctcttgagtcttcacaccgcctccttcggatccctccccatcctgaggacttcaggttgccggctcctcacttgggtcctgcgcacctcgggcttctcacagagtagccgtctccattctacggatagggaaacagaggaccagagccccgaaagtcgtacgccccaaagcccctgagagtggtctccaaatgctagtgctgtggctctggaaagattcattttatttcctgcaacaaaggcagcctcagagaactggcctccgagccttttccgtgcagacccccaatctttcaagacaccacagaccaattcagttggcaaaagccctaagaacagtacaccccaaaccaatggaataaaaaagttttgtttagttgagactgcagaactcttagctggcttacagatttctaaggcagcatttggcacctctgtttgctgtttggctcctctttcggcctctagagctgactgcagctccaatctccttgtcacatcctggtctgcaaactgagacctcacaggggcctttacaccgtagggcaactccttatgccgttgtcacactgaagctagaattctcaaagctggagcacttaggtgtctgcattttagaggtcccagcctgaatatatgcacaagcagggttttgtttctgagctcagtgaagaggactgctgtgactccagctcttctgaaatattagatgtgtaaaatgcaagattctcttccagccttgactggaggtgatgtggcaatgtgtgtacgcaagaaaagtccatgcagactttatacagactttactactacagacaagagaatctttctgaaagctaaggcccagagaagagcaaactactgaaaaactaaggcctgcatcagaagggcttctgcttccattaatggactgagtaattcagaccaagcctccatttgaagacaactaaaaatgctgggtaaaatatttttaagtatcttacttaaatattcaaaggttagtgaggaattgctgggccaaaatttgggaaaggaaaggaacatggaggtgagcctgcaactggggtcgcttctgttctgggagcatttgctgaagagagtttaagaatccaagctgcatttttggcagcctttaaaggcttaaagggagtagaaatggtgtcccagcccagagaatctcaagtaaccattgaacttgttcaaagtgactctaaactgctagtgtcaaaaacaatcattctgggaagaagataatagcatcctaggcctcaaatgcatctagcaaacaagcaaaaataatcaagccccagagaggcgagattgccataagaaaagcagaaacaggccaggtgcagtggctcatgcttgccataccagcactttgggaggctgaggctggggaattacttgagctcaagagttcaagaccagcctgcacaacatggtgaaactccgtttctacaaaaaatgcaaaagtcagttgggtgtggtggtgcacacctgtagtcccagctactagggtggctgaagtggatggacggcttgcgcttgggaagcagaggttgcaaagagctgagatcatgccactgtactccagcctgggccgtagagccagaccttgtctcaaaaagaaaagaaaagaaaaaaaaacaaaaataaaaacagacaacagaatcagacccatggggcttccagactctggggttattgggcatagactatataacaatgtatatgctatcttcaaaaggataaaagctatgtgtgaaacatttggcagagagctagaaattatagcaagtgacgtagcagattttttttggggaaaaggaaatctagattgagacagtgatgggcactagaattataaagtcatggaaactcaagtatggtggctgtgttggtcaatctgtgagcttagaaagaattaaacatgagcggctatgtgaccacagagagaaatggagagaatagcttcctatttttcagttgagttttttgctactacaaaattatataaccaaaaatagatgattttaactatgtaacttaaagggttatacatacacttggctcaaaaaataatatattaaaaggtatagattaagtaggactgtg

SEQ ID NO: 1208 - DNA, 2030 bp, Homo sapiens
aacgttccccaaccaccgtccgagctgccccactcttcgcccggtcactgatgcagaggctgtcaggcctctctgcgcacgaaacccatcacagcacctgggccagcagccagtgccgggctgtcctcttcccaccccaaggcggtcctcttgagtcttcacaccgcctccttcggatccctccccatcctgaggacttcaggttgccggctcctcacttgggtcctgcgcacctcgggcttctcacagagtagccgtctccattctacggatagggaaacagaggaccagagccccgaaagtcgtacgccccaaagcccctgagagtggtctccaaatgctagtgctgtggctctggaaagattcattttatttcctgcaacaaaggcagcctcagagaactggcctccgagccttttccgtgcagacccccaatctttcaagacaccacagaccaattcagttggcaaaagccctaagaacagtacaccccaaaccaatggaataaaaaagttttgtttagttgagactgcagaactcttagctggcttacagatttctaaggcagcatttggcacctctgtttgctgtttggctcctctttcggcctctagagctgactgcagctccaatctccttgtcacatcctggtctgcaaactgagacctcacaggggcctttacaccgtagggcaactccttatgccgttgtcacactgaagctagaattctcaaagctggagcacttaggtgtctgcattttagaggtcccagcctgaatatatgcacaagcagggttttgtttctgagctcagtgaagaggactgctgtgactccagctcttctgaaatattagatgtgtaaaatgcaagattctcttccagccttgactggaggtgatgtggcaatgtgtgtacgcaagaaaagtccatgcagactttatacagactttactactacagacaagagaatctttctgaaagctaaggcccagagaagagcaaactactgaaaaactaaggcctgcatcagaagggcttctgcttccattaatggactgagtaattcagaccaagcctccatttgaagacaactaaaaatgctgggtaaaatatttttaagtatcttacttaaatattcaaaggttagtgaggaattgctgggccaaaatttgggaaaggaaaggaacatggaggtgagcctgcaactggggtcgcttctgttctgggagcatttgctgaagagagtttaagaatccaagctgcatttttggcagcctttaaaggcttaaagggagtagaaatggtgtcccagcccagagaatctcaagtaaccattgaacttgttcaaagtgactctaaactgctagtgtcaaaaacaatcattctgggaagaagataatagcatcctaggcctcaaatgcatctagcaaacaagcaaaaataatcaagccccagagaggcgagattgccataagaaaagcagaaacaggccaggtgcagtggctcatgcttgccataccagcactttgggaggctgaggctggggaattacttgagctcaagagttcaagaccagcctgcacaacatggtgaaactccgtttctacaaaaaatgcaaaagtcagttgggtgtggtggtgcacacctgtagtcccagctactagggtggctgaagtggatggacggcttgcgcttgggaagcagaggttgcaaagagctgagatcatgccactgtactccagcctgggccgtagagccagaccttgtctcaaaaagaaaagaaaagaaaaaaaaacaaaaataaaaacagacaacagaatcagacccatggggcttccagactctggggttattgggcatagactatataacaatgtatatgctatcttcaaaaggataaaagctatgtgtgaaacatttggcagagagctagaaattatagcaagtgacgtagcagattttttttggggaaaaggaaatctagattgagacagtgatgggcactagaattataaagtcatggaaactc

SEQ ID NO: 1209 - DNA, 1081 bp, Homo sapiens
ctaattggcagaatctctgacctccactttctctgactcccttctcccttcctagaaacagtatccacagtggactccggggctcctacagacttggcacagcttcctacagtcttgaaacagccctgttgttctgtcatggccagtgggcagtttgtgaacaaactgcaagaggaagtgatctgccccatctgcctggacattctgcagaaacctgtcaccatcgactgtgggcacaatttctgcctcaaatgcatcactcagattggggaaacatcatgtggatttttcaaatgtcccctctgcaaaacttccgtaaggaagaacgcaatcaggttcaactcgctgttgcggaatctggtggagaaaatccaagctctacaagcctctgaggtgcagtccaaaaggaaagaggctacatgcccgaggcaccaggagatgttccactatttctgcgaggatgatgggaagttcctctgttttgtgtgtcgtgaatccaaggaccacaaatcccataatgtcagcttgatcgaagaagctgcccagaattatcaggggcagattcaagagcagatccaagtcttgcagcaaaaggagaaggagacagtacaagtgaaggcacaaggtgtacacagggtcgatgtcttcacggtaagaaaaactccatcccacgatctctggaagcagaaacatctctgccaaagctcctggaatcccctattacactgacccctcagaaaaagatccagtgagccatgtcctctcctctgcgcctcagcacctgaccggccaggcggcatcacctcccgcgtcggcctcgctattacagcgggctgactgctcagtctccaccggcagacaaggtggggcacggaaaacccgcgctggtcttagaatcgcaagtacaggtttttaaggccgagctgcgccctcaacggattccccagttagaaaatgaagacattggccgggcgcggtggctcacgccagtaatcacagcactctgggaggctgaggatcgcttgagcccaggagtttgagaccagcctgggcaacatagcgagactctcctcttaattaa

SEQ ID NO: 1210 - DNA, 872 bp, Homo sapiens
agattgagtgtaaaaagagactgtaaaagatagcaataatttttataatacatgttgaaataacattttgagaatattgagttaaataaaatatataattaaagttaattttactagtttctttctactttttaaatgtgactactagaaaatttaaaaatatataagtggctcacattcatgactcagattacattcatcattcatactggacagtgctgggctaggcagtcaccacaggaaagcagaaagggcatctctcaagggttgcataccttcctggtccaataagaatatgagagtcaaatgcagcttctacttctcccaggcatttcaaattagtgccttgctgtgtgatagtgagttctttgctcaacccctctggactctcaccatttcatcccattctttattccccagaccaactccaggctgataggaaaaaagatgaaaacagattcttcaaaagcatgaataaaaatgacatgaagagctgtaagtgagaaatgatggttggttgcttctgccatttggggaaagtgagaaaaggggaagaattgtgtctctatgattacatgaaggccagatataagtgaatgccgattcctcagccaattgagagaacaggcatatggttgttttattattttaaactcaggtaactcacaaaacagtcactaatcccaaactttgaagtattcagaagtaatagaaaattacaaatgtatttcttcactcctagagacagggaggaaaaagtgggacaagaaggaggcagctccacctctgtagtatttgctgcccctacagggcaccaggtttcgaggcaaactcctctgggtgtgaggtcagtacagctcaggggatggaga

SEQ ID NO: 1211 - DNA, 185 bp, Artificial
  Synthetic oligonucleotide
aacgttccccaaccaccgtccgagctgccccactcttcgcccggtcactgatgcagaggctgtcaggcctctctgcgcacgaaacccatcacagcacctgggccagcagccagtgccgggctgtcctcttcccaccccaaggcggtcctcttgagtcttcacaccgcctccttcggatccctccc

SEQ ID NO: 1212 - DNA, 2079 bp, Artificial
  Synthetic oligonucleotide
catcctgaggacttcaggttgccggctcctcacttgggtcctgcgcacctcgggcttctcacagagtagccgtctccattctacggatagggaaacagaggaccagagccccgaaagtcgtacgccccaaagcccctgagagtggtctccaaatgctagtgctgtggctctggaaagattcattttatttcctgcaacaaaggcagcctcagagaactggcctccgagccttttccgtgcagacccccaatctttcaagacaccacagaccaattcagttggcaaaagccctaagaacagtacaccccaaaccaatggaataaaaaagttttgtttagttgagactgcagaactcttagctggcttacagatttctaaggcagcatttggcacctctgtttgctgtttggctcctctttcggcctctagagctgactgcagctccaatctccttgtcacatcctggtctgcaaactgagacctcacaggggcctttacaccgtagggcaactccttatgccgttgtcacactgaagctagaattctcaaagctggagcacttaggtgtctgcattttagaggtcccagcctgaatatatgcacaagcagggttttgtttctgagctcagtgaagaggactgctgtgactccagctcttctgaaatattagatgtgtaaaatgcaagattctcttccagccttgactggaggtgatgtggcaatgtgtgtacgcaagaaaagtccatgcagactttatacagactttactactacagacaagagaatctttctgaaagctaaggcccagagaagagcaaactactgaaaaactaaggcctgcatcagaagggcttctgcttccattaatggactgagtaattcagaccaagcctccatttgaagacaactaaaaatgctgggtaaaatatttttaagtatcttacttaaatattcaaaggttagtgaggaattgctgggccaaaatttgggaaaggaaaggaacatggaggtgagcctgcaactggggtcgcttctgttctgggagcatttgctgaagagagtttaagaatccaagctgcatttttggcagcctttaaaggcttaaagggagtagaaatggtgtcccagcccagagaatctcaagtaaccattgaacttgttcaaagtgactctaaactgctagtgtcaaaaacaatcattctgggaagaagataatagcatcctaggcctcaaatgcatctagcaaacaagcaaaaataatcaagccccagagaggcgagattgccataagaaaagcagaaacaggccaggtgcagtggctcatgcttgccataccagcactttgggaggctgaggctggggaattacttgagctcaagagttcaagaccagcctgcacaacatggtgaaactccgtttctacaaaaaatgcaaaagtcagttgggtgtggtggtgcacacctgtagtcccagctactagggtggctgaagtggatggacggcttgcgcttgggaagcagaggttgcaaagagctgagatcatgccactgtactccagcctgggccgtagagccagaccttgtctcaaaaagaaaagaaaagaaaaaaaaacaaaaataaaaacagacaacagaatcagacccatggggcttccagactctggggttattgggcatagactatataacaatgtatatgctatcttcaaaaggataaaagctatgtgtgaaacatttggcagagagctagaaattatagcaagtgacgtagcagattttttttggggaaaaggaaatctagattgagacagtgatgggcactagaattataaagtcatggaaactcaagtatggtggctgtgttggtcaatctgtgagcttagaaagaattaaacatgagcggctatgtgaccacagagagaaatggagagaatagcttcctatttttcagttgagttttttgctactacaaaattatataaccaaaaatagatgattttaactatgtaacttaaagggttatacatacacttggctcaaaaaataatatattaaaaggtatagattaagtaggactgtg

SEQ ID NO: 1213 - DNA, 280 bp, Artificial
  Synthetic oligonucleotide
aaacagtatccacagtggactccggggctcctacagacttggcacagcttcctacagtcttgaaacagccctgttgttctgtcatggccagtgggcagtttgtgaacaaactgcaagaggaagtgatctgccccatctgcctggacattctgcagaaacctgtcaccatcgactgtgggcacaatttctgcctcaaatgcatcactcagattggggaaacatcatgtggatttttcaaatgtcccctctgcaaaacttccgtaaggaagaacgcaatcag

SEQ ID NO: 1214 - DNA, 136 bp, Artificial
  Synthetic oligonucleotide
gttcaactcgctgttgcggaatctggtggagaaaatccaagctctacaagcctctgaggtgcagtccaaaaggaaagaggctacatgcccgaggcaccaggagatgttccactatttctgcgaggatgatgggaag

SEQ ID NO: 1215 - DNA, 430 bp, Artificial
  Synthetic oligonucleotide
gtaagaaaaactccatcccacgatctctggaagcagaaacatctctgccaaagctcctggaatcccctattacactgacccctcagaaaaagatccagtgagccatgtcctctcctctgcgcctcagcacctgaccggccaggcggcatcacctcccgcgtcggcctcgctattacagcgggctgactgctcagtctccaccggcagacaaggtggggcacggaaaacccgcgctggtcttagaatcgcaagtacaggtttttaaggccgagctgcgccctcaacggattccccagttagaaaatgaagacattggccgggcgcggtggctcacgccagtaatcacagcactctgggaggctgaggatcgcttgagcccaggagtttgagaccagcctgggcaacatagcgagactctcctcttaattaa

SEQ ID NO: 1216 - DNA, 231 bp, Artificial
  Synthetic oligonucleotide
gaccaggtagaacatgagaagcaaaggatcctcacagaatttgaactcctgcatcaagtcctagaggaggagaagaatttcctgctatcacggatttactggctgggtcatgagggaacggaagcggggaaacactatgttgcctccactgagccacagttgaacgatctcaagaagctcgttgattccctgaagaccaagcagaacatgccacccaggcagctgctggag

SEQ ID NO: 1217 - DNA, 752 bp, Artificial
  Synthetic oligonucleotide
acttccgcctcctaggcccaagtcccaagtagctgggattacaggtccccaccaccacgcccagctaatttttgtattcttagcagacacggggttttaccatgttggccaggatggtctcgaactcctgacctcaagtgatctgcccacctcagcctcccaaagtgctgggattacaggcgtgaaccaccgtgcctggcctctatttttaatttaaatttgaattagtaaaaatgaaattaaaaattcagttctttgtcacactagccacaatttccaatgttcagtagccacatgtggttggtggctaccatattggacagtgcaagtctagctggtgcttaaaacaagctgagatgattcctcctcaagtcatctattctcccacaggttcaaaaacctatttatttattttaagaaagatcatgcaaagccattctagcctttctcctgccctggctagcagggctcccttgttcagtctcagagccaaattcatcttctaaatctcactcttctcttcttcactcagttcttcttgaggtcaaaacacttttctgcttactggcagagcagtgcttcttggagaagcccttcgtggtggggagaggggaggaggatggggtaagagagacttggaggggttcttactcctcctgctctgccccacacccagcaggctctgtatctcctccttggctcctgggaatcagccaagtgctgaggctgtgctgtttctctttctcttctag

SEQ ID NO: 1218 - DNA, 791 bp, Artificial
  Synthetic oligonucleotide
gtatgatgggccaccccaaatgtattttgcctactgattcatccacatacaattctcagcgtatatccaaatgcagtcaacattcctctctcagaaatacccacccacctctaactctgcattcatacatttaggctgcagctggggaatgcctatgccaaccatattagcacgtggttggttgttaaagaaaccagctgttttctcagccttcctccttcttcagcacagattctactatttcctgaatgcccccttgctcaactgaatagctcctgggtcccctactctgtctccctgaccctgtttttttccctcctctctgtctccatctcccatcttcatttccatatctccctatgccctacctcactcctgccccatatccctagccctgactttctgactcccagctcactatcccttaaccgccaggtcttcttctttttttttttttttttggagatggagctttgctcttgttgctcaggctggagtgcagtggtgcaatctcagctcactgcaacctttgtctcccaggttcaagtgattctcctgcctcagcctcccaagtagctgagactacaggcgcttgccaccaagcctggctaattttcatatttttagtagagaccgggttttaccatgttggccaggctagtcttgaactcctgacctcaggtgatccacccgcctcagcctcccaaagtgctgggattacaggtgtgagccaccgctctcagttctacccccaggtcttcatcccctcatttctcaaccccatatctcag

SEQ ID NO: 1219 - DNA, 420 bp, Artificial
  Synthetic oligonucleotide
agattgagtgtaaaaagagactgtaaaagatagcaataatttttataatacatgttgaaataacattttgagaatattgagttaaataaaatatataattaaagttaattttactagtttctttctactttttaaatgtgactactagaaaatttaaaaatatataagtggctcacattcatgactcagattacattcatcattcatactggacagtgctgggctaggcagtcaccacaggaaagcagaaagggcatctctcaagggttgcataccttcctggtccaataagaatatgagagtcaaatgcagcttctacttctcccaggcatttcaaattagtgccttgctgtgtgatagtgagttctttgctcaacccctctggactctcaccatttcatcccattctttattccccag

SEQ ID NO: 1220 - DNA, 377 bp, Artificial
  Synthetic oligonucleotide
gtaagtgagaaatgatggttggttgcttctgccatttggggaaagtgagaaaaggggaagaattgtgtctctatgattacatgaaggccagatataagtgaatgccgattcctcagccaattgagagaacaggcatatggttgttttattattttaaactcaggtaactcacaaaacagtcactaatcccaaactttgaagtattcagaagtaatagaaaattacaaatgtatttcttcactcctagagacagggaggaaaaagtgggacaagaaggaggcagctccacctctgtagtatttgctgcccctacagggcaccaggtttcgaggcaaactcctctgggtgtgaggtcagtacagctcaggggatggaga

SEQ ID NO: 1221 - DNA, 421 bp, Artificial
  Synthetic oligonucleotide
ccaggtcatatgatcattaagtgaaagagagagaattagaactcctttctccaaagccagaaactacagaatgcattccaaagccagagagcaggatttagggatcctattccaccagcatttctccacaaaaggagctaccggtgtttagaaaggccatctttgttatgctccatgacttttgccctgttaaatgcttagtatcccaggccccagaaagccctataagccagtagagaaccacactcttgttgtcactgagacaacctgaaaggtttccacacttccccctgggtggggaatgggtcccactgagaaccattgactgttctgattgatgatggcagggtgcttgtttttgtttttaatttgcagcttctggttatcaagaccaaataggttttctctccccaatttttag

SEQ ID NO: 1222 - DNA, 312 bp, Artificial
  Synthetic oligonucleotide
gtaagagtcctgtctctgaatactaagggacctctaagtctacaggtggtcaaaatgctgtatccacccaattccactaaatggaataaatgaataaatgaatgaattcatttattccatttcctcagttcctccccaaattacacctctgccaggaaacagagggcgctccgacttgttcaggtgtactttcttgagtttcacctccatccctcctgctgtatgtagagctcagctgtgctgtctggcaatggaggattgctgccgaggtgctcccgctgacctcttttctcctttccttctcccgcaaag

SEQ ID NO: 1223 - DNA, 318 bp, Artificial
  Synthetic oligonucleotide
gcggcagaactacatcggggccaccaaatcaccactcttcagccccatcccactccctgtttcgggcctcgtctgctgggaaagtcacttttccagtatgtctcctggcctcttatgatgagatttctggtcaaggagcgagctctcaggatacgaagacatttgacgttgcgctgtccgaggagctccatgcggcactgagtgagtggctgacagcgatccgggcttggttttgtgaggttccttcaagctaagccagctcagagaacacggggagcggtggtgctacacggacttcggagcatagagtggcgctga

SEQ ID NO: 1224 - DNA, 226 bp, Artificial
  Synthetic oligonucleotide
gtgagtggctgagaccgaccacggttcttgacttagtggaattgggtcgaaggagtggagaatgggagggctcgggctactgagagtggagatgggggcgggggtggtggtgaagagagttggagaaggaatggacgagttcttgagcaaaaggaggggaagagacaatctccagccacccgccccacgcttgacttcttatcactttggctgtggtgccgcctag

SEQ ID NO: 1225 - DNA, 247 bp, Artificial
  Synthetic oligonucleotide
agtccatcaaaccccatgagcccgaccactctcgctcttccttacattcccacgtcccccttctctcccaacccctcatatcagcaagggaaattaattaatgagatttgataaatcagtagatagaatgaggtccccattctgaaatatttagcagactggaaccaccacgcaagcctctgtagggggtggatggagacacttctaactttaataaactgcgactgaacgtggaatcctagaaaaa

SEQ ID NO: 1226 - DNA, 27 bp, Artificial
  Synthetic oligonucleotide
tctagaggatccgccaagaggtagaag

SEQ ID NO: 1227 - DNA, 28 bp, Artificial
  Synthetic oligonucleotide
tatccatttgttctcaagaggtagcaag

SEQ ID NO: 1228 - DNA, 55 bp, Artificial
  Synthetic oligonucleotide
ctaattggcagaatctctgacctccactttctctgactcccttctcccttcctag

SEQ ID NO: 1229 - DNA, 84 bp, Artificial
  Synthetic oligonucleotide
ttcctctgttttgtgtgtcgtgaatccaaggaccacaaatcccataatgtcagcttgatcgaagaagctgcccagaattatcag

SEQ ID NO: 1230 - DNA, 109 bp, Artificial
  Synthetic oligonucleotide
gagaatggaaaggatgtgaaaatttgactcagaaggtttgggctcaagcccagtcttgtgagtttactgtacaacctgcaaggaatcactttacctctctgagcctcag

SEQ ID NO: 1231 - DNA, 96 bp, Artificial
  Synthetic oligonucleotide
gggcagattcaagagcagatccaagtcttgcagcaaaaggagaaggagacagtacaagtgaaggcacaaggtgtacacagggtcgatgtcttcacg

SEQ ID NO: 1232 - DNA, 23 bp, Artificial
  Synthetic oligonucleotide
gatatcaaagtcgtcttgtgcag

SEQ ID NO: 1233 - DNA, 24 bp, Artificial
  Synthetic oligonucleotide
gtatacaaagtcgtcttgtggcag

SEQ ID NO: 1234 - DNA, 62 bp, Artificial
  Synthetic oligonucleotide
atcctccttctcccacacctcatcccctgatctcaccaaccagctcaaccacatcttcctag

SEQ ID NO: 1235 - DNA, 44 bp, Artificial
  Synthetic oligonucleotide
aagtgaagagtttcagtttctcaacccaacccctgttcctctgg

SEQ ID NO: 1236 - DNA, 72 bp, Artificial
  Synthetic oligonucleotide
aactggagaaaaaactcagtgaagcaaaatcaagacacgactccatcacagggagcctgaaaaaattcaaag

SEQ ID NO: 1237 - DNA, 75 bp, Artificial
  Synthetic oligonucleotide
accaactccaggctgataggaaaaaagatgaaaacagattcttcaaaagcatgaataaaaatgacatgaagagct

SEQ ID NO: 1238 - DNA, 66 bp, Artificial
  Synthetic oligonucleotide
ggggcttgttacagaaaaataatcataaaatgaacaaaacctcagagcccgggtcatcttctgcag

SEQ ID NO: 1239 - DNA, 113 bp, Artificial
  Synthetic oligonucleotide
tggaaaaaggaagtccctgcagcagtccccgcactctttaagcagctgtttaccgaaggcaccagttcagccaggagtgaaatccggagaggagcaacgccagcctgggtcac

SEQ ID NO: 1240 - protein, 425 aa, Homo sapiens
MASGQFVNKLQEEVICPICLDILQKPVTIDCGHNFCLKCITQIGETSCGFFKCPLCKTSVRKNAIRFNSLLRNLVEKIQALQASEVQSKRKEATCPRHQEMFHYFCEDDGKFLCFVCRESKDHKSHNVSLIEEAAQNYQGQIQEQIQVLQQKEKETVQVKAQGVHRVDVFTDQVEHEKQRILTEFELLHQVLEEEKNFLLSRIYWLGHEGTEAGKHYVASTEPQLNDLKKLVDSLKTKQNMPPRQLLEDIKVVLCRSEEFQFLNPTPVPLELEKKLSEAKSRHDSITGSLKKFKDQLQADRKKDENRFFKSMNKNDMKSWGLLQKNNHKMNKTSEPGSSSAGGRTTSGPPNHHSSAPSHSLFRASSAGKVTFPVCLLASYDEISGQGASSQDTKTFDVALSEELHAALSEWLTAIRAWFCEVPSS

SEQ ID NO: 1241 - protein, 425 aa, Homo sapiens
MASGQFVNKLQEEVICPICLDILQKPVTIDCGHNFCLKCITQIGETSCGFFKCPLCKTSVRRDAIRFNSLLRNLVEKIQALQASEVQSKRKEATCPRHQEMFHYFCEDDGKFLCFVCRESKDHKSHNVSLIEEAAQNYQGQIQEQIQVLQQKEKETVQVKAQGVHRVDVFTDQVEHEKQRILTEFELLHQVLEEEKNFLLSRIYWLGHEGTEAGKHYVASTEPQLNDLKKLVDSLKTKQNMPPRQLLEDIKVVLCRSEEFQFLNPTPVPLELEKKLSEAKSRHDSITGSLKKFKDQLQADRKKDENRFFKSMNKNDMKSWGLLQKNNHKMNKTSEPGSSSAGGRTTSGPPNHHSSAPSHSLFRASSAGKVTFPVCLLASYDEISGQGASSQDTKTFDVALSEELHAALSEWLTAIRAWFCEVPSS

SEQ ID NO: 1242 - protein, 425 aa, Homo sapiens [sequence omitted]

SEQ ID NO: 1243 - protein, 236 aa, Homo sapiens
MASGQFVNKLQEEVICPICLDILQKPVTIDCGHNFCPQCITQIGETSCGFFKCPLCKTSVRRDAIRFNSLLRNLVEKIQALQASEVQSKRKEATCPRHQEMFHYFCEDDGKFLCFVCRESKDHKSHNVSLIEEAAQNYQGQIQEQIQVLQQKEKETVQVKAQGVHRVDVFTDQVEHEKQRILTEFELLHQVLEEEKNFLLSRIYWLGHEGTEAGKHYVEIPLMPTVERSQEARCYP

SEQ ID NO: 1244 - protein, 425 aa, Homo sapiens; identical to SEQ ID NO: 1241

SEQ ID NO: 1245 - protein, 267 aa, Homo sapiens
MASGQFVNKLQEEVICPICLDILQKPVTIDCGHNFCLKCITQIGETSCGFFKCPLCKTSVRRDAIRFNSLLRNLVEKIQALQASEVQSKRKEATCPRHQEMFHYFCEDDGKFLCFVCRESKDHKSHNVSLIEEAAQNYQGQIQEQIQVLQQKEKETVQVKAQGVHRVDVFTDQVEHEKQRILTEFELLHQVLEEEKNFLLSRIYWLGHEGTEAGKHYVASTEPQLNDLKKLVDSLKTKQNMPPRQLLENWRKNSVKQNQDTTPSQGA

SEQ ID NO: 1246 - protein, 425 aa, Homo sapiens; identical to SEQ ID NO: 1240

SEQ ID NO: 1247 - protein, 267 aa, Homo sapiens [sequence omitted]

SEQ ID NO: 1248 - protein, 260 aa, Homo sapiens
MASGQFVNKLQEEVICPICLDILQKPVTIDCGHNFCLKCITQIGETSCGFFKCPLCKTSVRKNAIRFNSLLRNLVEKIQALQASEVQSKRKEATCPRHQEMFHYFCEDDGKFLCFVCRESKDHKSHNVSLIEEAAQNYQGQIQEQIQVLQQKEKETVQVKAQGVHRVDVFTDQVEHEKQRILTEFELLHQVLEEEKNFLLSRIYWLGHEGTEAGKHYVASTEPQLNDLKKLVDSLKTKQNMPPRQLLEDIKVVLCRPTPG

SEQ ID NO: 1249 - protein, 310 aa, Homo sapiens
MASGQFVNKLQEEVICPICLDILQKPVTIDCGHNFCLKCITQIGETSCGFFKCPLCKTSVRKNAIRFNSLLRNLVEKIQALQASEVQSKRKEATCPRHQEMFHYFCEDDGKFLCFVCRESKDHKSHNVSLIEEAAQNYQGQIQEQIQVLQQKEKETVQVKAQGVHRVDVFTDQVEHEKQRILTEFELLHQVLEEEKNFLLSRIYWLGHEGTEAGKHYVASTEPQLNDLKKLVDSLKTKQNMPPRQLLEDIKVVLCRSSFSHTSSPDLTNQLNHIFLEVKSFSFSTQPLFLWNWRKNSVKQNQDTTPSQGA

SEQ ID NO: 1250 - protein, 349 aa, Homo sapiens
MASGQFVNKLQEEVICPICLDILQKPVTIDCGHNFCLKCITQIGETSCGFFKCPLCKTSVRKNAIRFNSLLRNLVEKIQALQASEVQSKRKEATCPRHQEMFHYFCEDDGKFLCFVCRESKDHKSHNVSLIEEAAQNYQGQIQEQIQVLQQKEKETVQVKAQGVHRVDVFTDQVEHEKQRILTEFELLHQVLEEEKNFLLSRIYWLGHEGTEAGKHYVASTEPQLNDLKKLVDSLKTKQNMPPRQLLEDIKVVLCRSEEFQFLNPTPVPLELEKKLSEAKSRHDSITGSLKKFKDQLQADRKKDENRFFKSMNKNDMKSWGLLQKNNHKMNKTSEPGSSSAGKSPVSEY

SEQ ID NO: 1251 - protein, 262 aa, Homo sapiens
MASGQFVNKLQEEVICPICLDILQKPVTIDCGHNFCLKCITQIGETSCGFFKCPLCKTSVRKNAIRFNSLLRNLVEKIQALQASEVQSKRKEATCPRHQEMFHYFCEDDGKFLCFVCRESKDHKSHNVSLIEEAAQNYQGQIQEQIQVLQQKEKETVQVKAQGVHRVDVFTDQVEHEKQRILTEFELLHQVLEEEKNFLLSRIYWLGHEGTEAGKHYVASTEPQLNDLKKLVDSLKTKQNMPPRQLLEDIKVVLCRTGEKTQ

SEQ ID NO: 1252 - protein, 114 aa, Homo sapiens
MNKNDMKSWGLLQKNNHKMNKTSEPGSSSAGGRTTSGPPNHHSSAPSHSLFRASSAGKVTFPVCLLASYDEISGQGASSQDTKTFDVALSEELHAALSEWLTAIRAWFCEVPSS

SEQ ID NO: 1253 - protein, 110 aa, Homo sapiens
MNEFIYSISSVPPQITPLPGNRGRSDLFRCTFLSFTSIPPAVCRAQLCCLAMEDCCRGAPADLFSPFLLPQRRQNYIGATKSPLFSPIPLPVSGLVCWESHFSSMSPGLL

SEQ ID NO: 1254 - protein, 321 aa, Homo sapiens
MASGQFVNKLQEEVICPICLDILQKPVTIDCGHNFCLKCITQIGETSCGFFKCPLCKTSVRKNAIRFNSLLRNLVEKIQALQASEVQSKRKEATCPRHQEMFHYFCEDDGKFLCFVCRESKDHKSHNVSLIEEAAQNYQGQIQEQIQVLQQKEKETVQVKAQGVHRVDVFTDQVEHEKQRILTEFELLHQVLEEEKNFLLSRIYWLGHEGTEAGKHYVASTEPQLNDLKKLVDSLKTKQNMPPRQLLEDIKVVLCRSEEFQFLNPTPVPLELEKKLSEAKSRHDSITGSLKKFKDQLQADRKKDENRFFKSMNKNDMKSCK

SEQ ID NO: 1255 - protein, 56 aa, Homo sapiens
MLVLWLWKDSFYFLQQRQPQRTGLRAFSVQTPNLSRHHRPIQLAKALRTVHPKPME

SEQ ID NO: 1256 - protein, 196 aa, Homo sapiens
MASGQFVNKLQEEVICPICLDILQKPVTIDCGHNFCLKCITQIGETSCGFFKCPLCKTSVRKNAIRFNSLLRNLVEKIQALQASEVQSKRKEATCPRHQEMFHYFCEDDGKFLCFVCRESKDHKSHNVSLIEEAAQNYQGQIQEQIQVLQQKEKETVQVKAQGVHRVDVFTVRKTPSHDLWKQKHLCQSSWNPLLH

SEQ ID NO: 1257 - protein, 425 aa, Homo sapiens; identical to SEQ ID NO: 1240

SEQ ID NO: 1258 - protein, 342 aa, Homo sapiens
MHHSDWGNIMWIFQMSPLQNFRKEERNQFLCFVCRESKDHKSHNVSLIEEAAQNYQGQIQEQIQVLQQKEKETVQVKAQGVHRVDVFTDQVEHEKQRILTEFELLHQVLEEEKNFLLSRIYWLGHEGTEAGKHYVASTEPQLNDLKKLVDSLKTKQNMPPRQLLEDIKVVLCRSEEFQFLNPTPVPLELEKKLSEAKSRHDSITGSLKKFKDQLQADRKKDENRFFKSMNKNDMKSWGLLQKNNHKMNKTSEPGSSSAGGRTTSGPPNHHSSAPSHSLFRASSAGKVTFPVCLLASYDEISGQGASSQDTKTFDVALSEELHAALSEWLTAIRAWFCEVPSS

SEQ ID NO: 1259 - protein, 185 aa, Homo sapiens
MPPRQLLEDIKVVLCRSEEFQFLNPTPVPLELEKKLSEAKSRHDSITGSLKKFKDQLQADRKKDENRFFKSMNKNDMKSWGLLQKNNHKMNKTSEPGSSSAGGRTTSGPPNHHSSAPSHSLFRASSAGKVTFPVCLLASYDEISGQGASSQDTKTFDVALSEELHAALSEWLTAIRAWFCEVPSS

SEQ ID NO: 1260 - DNA, 23 bp, Artificial
  Synthetic oligonucleotide
tttcttagcaccaccacgaagtc

SEQ ID NO: 1261 - DNA, 101 bp, Artificial
  Synthetic oligonucleotide
ctggcaagcagctggaagatggacgtactttgtctgactacaatattcaaaaggagtctactcttcatcttgtgttgagacttcgtggtggtgctaagaaa

SEQ ID NO: 1262 - DNA, 23 bp, Artificial
  Synthetic oligonucleotide
tggcaagaagaaggtctggttag

SEQ ID NO: 1263 - DNA, 22 bp, Artificial
  Synthetic oligonucleotide
tgatcagcccatctttgatgag

SEQ ID NO: 1264 - DNA, 101 bp, Artificial
  Synthetic oligonucleotide
tggcaagaagaaggtctggttagaccccaatgagaccaatgaaatcgccaatgccaactcccgtcagcagatccggaagctcatcaaagatgggctgatca

SEQ ID NO: 1265 - DNA, 20 bp, Artificial
  Synthetic oligonucleotide
cggtttgctgcggtaatcat

SEQ ID NO: 1266 - DNA, 21 bp, Artificial
  Synthetic oligonucleotide
tttcttgctgccagtctggac

SEQ ID NO: 1267 - DNA, 122 bp, Artificial
  Synthetic oligonucleotide
cggtttgctgcggtaatcatgaggataagagagccacgaaccacggcactgattttcagttctgggaaaatggtgtgcacaggagccaagagtgaagaacagtccagactggcagcaagaaa

SEQ ID NO: 1268 - DNA, 19 bp, Artificial
  Synthetic oligonucleotide
atttgggtcgcggttcttg

SEQ ID NO: 1269 - DNA, 21 bp, Artificial
  Synthetic oligonucleotide
tgccttgacattctcgatggt

SEQ ID NO: 1270 - DNA, 133 bp, Artificial
  Synthetic oligonucleotide
atttgggtcgcggttcttgtttgtggatcgctgtgatcgtcacttgacaatgcagatcttcgtgaagactctgactggtaagaccatcaccctcgaggttgagcccagtgacaccatcgagaatgtcaaggca

SEQ ID NO: 1271 - DNA, 20 bp, Artificial
  Synthetic oligonucleotide
tgggaacaagagggcatctg

SEQ ID NO: 1272 - DNA, 22 bp, Artificial
  Synthetic oligonucleotide
ccaccactgcatcaaattcatg

SEQ ID NO: 1273 - DNA, 86 bp, Artificial
  Synthetic oligonucleotide
tgggaacaagagggcatctgctaaagtttcagattccatttctgctcagtatccagtagtggatcatgaatttgatgcagtggtgg

SEQ ID NO: 1274 - DNA, 21 bp, Homo sapiens
ggcgtctttctccctctgaac

SEQ ID NO: 1275 - DNA, 20 bp, Homo sapiens
gtcccattctgggtgctgtg

SEQ ID NO: 1276 - DNA, 114 bp, Homo sapiens
ggcgtctttctccctctgaacctcagtttccacctgtgtcgagtgtgggtgagacccctcgcggggagctatgcaggttacggagaaaaggcagcacagcacccagaatgggac

SEQ ID NO: 1277 - DNA, 21 bp, Homo sapiens
ccagcaatccacacaagagct

SEQ ID NO: 1278 - DNA, 21 bp, Homo sapiens
cagggtctggtccaatcagag

SEQ ID NO: 1279 - DNA, 144 bp, Artificial
  Synthetic oligonucleotide
ccagcaatccacacaagagctctttatccccaacatcactgtgaataatagcggatcctatatgtgccaagcccataactcagccactggcctcaataggaccacagtcacgatgatcacagtctctgattggaccagaccctg

SEQ ID NO: 1280 - DNA, 21 bp, Artificial
  Synthetic oligonucleotide
ccagcaatccacacaagagct

SEQ ID NO: 1281 - DNA, 21 bp, Artificial
  Synthetic oligonucleotide
cagggtctggtccaatcagag

SEQ ID NO: 1282 - DNA, 144 bp, Artificial; identical to SEQ ID NO: 1279
  Synthetic oligonucleotide

SEQ ID NO: 1283 - DNA, 21 bp, Artificial
  Synthetic oligonucleotide
gtccttccagtgcaagaccca

SEQ ID NO: 1284 - DNA, 16 bp, Artificial
  Synthetic oligonucleotide
tgggcctggcaaagcc

SEQ ID NO: 1285 - DNA, 149 bp, Artificial
  Synthetic oligonucleotide
gtccttccagtgcaagacccaaaaccgccagggccacctgtggcctcctcgtcctcggccactagcctgccgtggcccgtggtcatcggcatcccagccggcgctgtcttcatcctgggcaccctgctcctgtggctttgccaggccca

SEQ ID NO: 1286 - DNA, 19 bp, Artificial
  Synthetic oligonucleotide
ccgacggctcctacctcaa

SEQ ID NO: 1287 - DNA, 21 bp, Artificial
  Synthetic oligonucleotide
ggaagctgtagcccatggtgt

SEQ ID NO: 1288 - DNA, 102 bp, Artificial
  Synthetic oligonucleotide
ccgacggctcctacctcaataagctgctcatcacccgtgcccgccaggacgatgcgggcatgtacatctgccttggcgccaacaccatgggctacagcttcc

SEQ ID NO: 1289 - DNA, 25 bp, Artificial
  Synthetic oligonucleotide
gaaggcacaggaaaaacagatattg

SEQ ID NO: 1290 - DNA, 21 bp, Artificial
  Synthetic oligonucleotide
tggtgctcttggtcacaggat

SEQ ID NO: 1291 - DNA, 119 bp, Artificial
  Synthetic oligonucleotide
gaaggcacaggaaaaacagatattgcatcacgttaccctaccctttggactgaacaggttaaaagtcggcagaacaaaaccaataagaattcagtgtcatcctgtgaccaagagcacca

SEQ ID NO: 1292 - DNA, 22 bp, Artificial
  Synthetic oligonucleotide
ctcctgaaccctactccaagca

SEQ ID NO: 1293 - DNA, 21 bp, Artificial
  Synthetic oligonucleotide
caggcgatcctatggaaatcc

SEQ ID NO: 1294 - DNA, 101 bp, Artificial
  Synthetic oligonucleotide
ctcctgaaccctactccaagcacagcctctgtctgactcccttgtccttcaagagaactgttctccaggtctcagggccaggatttccataggatcgcctg

SEQ ID NO: 1295 - DNA, 26 bp, Homo sapiens
acactaaaagaacaaacaccttgctc

SEQ ID NO: 1296 - DNA, 22 bp, Homo sapiens
tcctcagaaggcacatgaaaga

SEQ ID NO: 1297 - DNA, 106 bp, Artificial
  Synthetic oligonucleotide
acactaaaagaacaaacaccttgctcttcgagatgagacattttgccaagcagttgaccacttagttctcaagaagcaactatctctttcatgtgccttctgagga

SEQ ID NO: 1298 - DNA, 20 bp, Homo sapiens
agtgatggagcaaagtgccg

SEQ ID NO: 1299 - DNA, 21 bp, Homo sapiens
cagcagctgatgcaaactgag

SEQ ID NO: 1300 - DNA, 132 bp, Artificial
  Synthetic oligonucleotide
agtgatggagcaaagtgccgggatcatgtaccgcaagtcctgtgcatcatcagcggcctgtctcatcgcctctgccgggtaccagtccttctgctccccagggaaactgaactcagtttgcatcagctgctg

SEQ ID NO: 1301 - DNA, 30 bp, Homo sapiens
cggtgacgttgtttaatagaatatatctgt

SEQ ID NO: 1302 - DNA, 25 bp, Homo sapiens
aagaaacgtgcaatttatctttgct

SEQ ID NO: 1303 - DNA, 103 bp, Artificial
  Synthetic oligonucleotide
cggtgacgttgtttaatagaatatatctgttcattcagttgcctgttttgtggttgaacctgtgatagccaccagggaagcaaagataaattgcacgtttctt

SEQ ID NO: 1304 - DNA, 22 bp, Artificial
  Synthetic oligonucleotide
ggcaatgtattccaagatgcag

SEQ ID NO: 1305 - DNA, 25 bp, Artificial
  Synthetic oligonucleotide
tctgtatgggtctcttacggtttct

SEQ ID NO: 1306 - DNA, 96 bp, Artificial
  Synthetic oligonucleotide
ggcaatgtattccaagatgcagtcttcaatcaaacagttacagttattgaaagagaggatgggttagatggagaaaccgtaagagacccatacaga

SEQ ID NO: 1307 - DNA, 27 bp, Artificial
  Synthetic oligonucleotide
atgggttagatggagaaacataaagct

SEQ ID NO: 1308 - DNA, 25 bp, Artificial
  Synthetic oligonucleotide
tgcacaaaggaacatttactcatca

SEQ ID NO: 1309 - DNA, 102 bp, Artificial
  Synthetic oligonucleotide
atgggttagatggagaaacataaagcttcaccaagaaggttgcccaggaaacgggcacagaagagatcagtgggatctgatgagtaaatgttcctttgtgca

SEQ ID NO: 1310 - DNA, 25 bp, Artificial
  Synthetic oligonucleotide
acatttggttcttccaagggactac

SEQ ID NO: 1311 - DNA, 19 bp, Artificial
  Synthetic oligonucleotide
tcgatctcagagggcaccc

SEQ ID NO: 1312 - DNA, 111 bp, Artificial
  Synthetic oligonucleotide
acatttggttcttccaagggactactggcgtttccaccccagcacccggcgtgtagacagtcccgtgccccgcagggccactgactggagaggggtgccctctgagatcga

SEQ ID NO: 1313 - DNA, 19 bp, Artificial
  Synthetic oligonucleotide
cactgccccagcttatccc

SEQ ID NO: 1314 - DNA, 21 bp, Artificial
  Synthetic oligonucleotide
ctctcccagcctcagtttcct

SEQ ID NO: 1315 - DNA, 108 bp, Artificial
  Synthetic oligonucleotide
cactgccccagcttatcccaggcctcccgcttccctctgcgggtggggtgctgagcaggcattattggcctgcatgttttactgatgaggaaactgaggctgggagag

SEQ ID NO: 1316 - DNA, 22 bp, Artificial
  Synthetic oligonucleotide
atttccatcctcaactggcaga

SEQ ID NO: 1317 - DNA, 16 bp, Artificial
  Synthetic oligonucleotide
tgccctggaacccacg

SEQ ID NO: 1318 - DNA, 104 bp, Artificial
  Synthetic oligonucleotide
atttccatcctcaactggcagagatgagagcctggagcattgcagatgccagggacttcacaaatgaaggcacagcatgggaaacctgcgtgggttccagggca

SEQ ID NO: 1319 - DNA, 24 bp, Artificial
  Synthetic oligonucleotide
tggagattcctggtttaaagcatt

SEQ ID NO: 1320 - DNA, 20 bp, Artificial
  Synthetic oligonucleotide
ccccagcttagagctgcact

SEQ ID NO: 1321 - DNA, 105 bp, Artificial
  Synthetic oligonucleotide
tggagattcctggtttaaagcatttaaagcctctgtgaaaatttgcccaggccaacaacttcactttccacactcagtgccacgaagtgcagctctaagctgggg

SEQ ID NO: 1322 - DNA, 21 bp, Homo sapiens
cattctccacgcatcagatga

SEQ ID NO: 1323 - DNA, 20 bp, Homo sapiens
accatcagattggcagcatg

SEQ ID NO: 1324 - DNA, 114 bp, Homo sapiens
cattctccacgcatcagatgatcctgtggcccctcagtgccaggccccactggccctctgcgcacatcagtgactctgatgttctcccccaccgcatgctgccaatctgatggt

SEQ ID NO: 1325 - DNA, 19 bp, Homo sapiens
gaatcagcccaaagccagg

SEQ ID NO: 1326 - DNA, 20 bp, Homo sapiens
gctggtgaaagcactgggtt

SEQ ID NO: 1327 - DNA, 114 bp, Homo sapiens
gaatcagcccaaagccaggcgtccagggtctccctcacctgaagctgactttttccccaccttggacagagggcgggagatgccatccccactgaacccagtgctttcaccagc

SEQ ID NO: 1328 - DNA, 19 bp, Homo sapiens
catggaccccaggcaagtc

SEQ ID NO: 1329 - DNA, 21 bp, Homo sapiens
ctgtttagggtcgaggctgtg

SEQ ID NO: 1330 - DNA, 123 bp, Homo sapiens
catggaccccaggcaagtccccccacccacgcatttctaatcatctgccctggttttgcctcctgagtctgttaaggctgtgtgcccctcatcgaggcccgtcacagcctcgaccctaaacag

SEQ ID NO: 1331 - DNA, 50 bp, Homo sapiens
agagaatatcactccgatggtcggtttctgactgtcacgctaagggcaac

SEQ ID NO: 1332 - DNA, 50 bp, Homo sapiens
gaacacagagaacgtcagcggtgaaggcgagaaccgaggctgctgtggaa

SEQ ID NO: 1333 - DNA, 50 bp, Homo sapiens
ggcccagcattgggaaccttgagcatgtgtctgaaaatgggcatcattct

SEQ ID NO: 1334 - DNA, 50 bp, Homo sapiens
gactcaggagatgaacagctcccaactatttgccgggaagacccagagat

SEQ ID NO: 1335 - DNA, 21 bp, Artificial
  Synthetic oligonucleotide
cagcaggaaattcggtgtgtc

SEQ ID NO: 1336 - DNA, 19 bp, Artificial
  Synthetic oligonucleotide
tcaaggttcccaatgctgg

SEQ ID NO: 1337 - DNA, 142 bp, Artificial
  Synthetic oligonucleotide
cagcaggaaattcggtgtgtcataaccatcataaccataattccataggaaagcaagttcccacctcaacaaatgccaatctcaataatgccaatatgtccaaagctgcccatggaaagcggcccagcattgggaaccttga

SEQ ID NO: 1338 - DNA, 50 bp, Homo sapiens
caagaggggtttggctgagactttaggattgtgattcagcttagagggac

SEQ ID NO: 1339 - DNA, 50 bp, Homo sapiens
tcctgcctgtcacctgaagttctagatcattccctggactccactctatc

SEQ ID NO: 1340 - DNA, 17 bp, Artificial
  Synthetic oligonucleotide
cggcctcccaaagtgct

SEQ ID NO: 1341 - DNA, 23 bp, Artificial
  Synthetic oligonucleotide
gggaagctcctgattgtagaagg

SEQ ID NO: 1342 - DNA, 125 bp, Artificial
  Synthetic oligonucleotide
cggcctcccaaagtgctgggattacaggcgtgagccaccgcacccggccgatttggactttttaacacaggattgggacaggattcagagggacactgtggcccttctacaatcaggagcttccc

SEQ ID NO: 1343 - DNA, 24 bp, Artificial
  Synthetic oligonucleotide
ctggagcatcagcatcatattctg

SEQ ID NO: 1344 - DNA, 20 bp, Artificial
  Synthetic oligonucleotide
gagagttggccgagatggag

SEQ ID NO: 1345 - DNA, 151 bp, Artificial
  Synthetic oligonucleotide
ctggagcatcagcatcatattctggggtggagtctatctggttctcaccaaagagccaagaagacattttctttcccagtctgtgttccatgggcacaaggaaatcccaaattctatcctgagccccctcactccatctcggccaactctc

SEQ ID NO: 1346 - DNA, 21 bp, Artificial
  Synthetic oligonucleotide
gaagcagagtcccccagaact

SEQ ID NO: 1347 - DNA, 20 bp, Artificial
  Synthetic oligonucleotide
aaggcccaggctagtgcatt

SEQ ID NO: 1348 - DNA, 111 bp, Artificial
  Synthetic oligonucleotide
gaagcagagtcccccagaactgggcttttcattcccctggtgggagcccatgagaagcgagttctctgtgcaacggacttagtaaatacagaatgcactagcctgggcctt

SEQ ID NO: 1349 - DNA, 19 bp, Artificial
  Synthetic oligonucleotide
tggtctggactcaatcccg

SEQ ID NO: 1350 - DNA, 21 bp, Artificial
  Synthetic oligonucleotide
ggagtctgagtccaagcagcc

SEQ ID NO: 1351 - DNA, 104 bp, Artificial
  Synthetic oligonucleotide
tggtctggactcaatcccgggactttaggacttttgctagaaatctggtgtggtgcaggagcgactccaggattcactctgtgggctgcttggactcagactcc

SEQ ID NO: 1352 - DNA, 22 bp, Artificial
  Synthetic oligonucleotide
cttcttgtccacggttttgttg

SEQ ID NO: 1353 - DNA, 20 bp, Artificial
  Synthetic oligonucleotide
aacattcctggccacctgaa

SEQ ID NO: 1354 - DNA, 101 bp, Artificial
  Synthetic oligonucleotide
cttcttgtccacggttttgttgagttttcactcttctaatgcaagggtctcacactgtgaaccacttaggatgtgatcactttcaggtggccaggaatgtt

SEQ ID NO: 1355 - DNA, 19 bp, Artificial
  Synthetic oligonucleotide
ctgctgggcatcctcgtct

SEQ ID NO: 1356 - DNA, 19 bp, Artificial
  Synthetic oligonucleotide
cgtacccaggtgccatctg

SEQ ID NO: 1357 - DNA, 101 bp, Artificial
  Synthetic oligonucleotide
ctgggcatcctcgtcttctcactgcactgccccagtgtgcccatggcgggcgtcacagccagctacggcgggaggtgagggccagatggcacctgggtacg

SEQ ID NO: 1358 - DNA, 21 bp, Artificial
  Synthetic oligonucleotide
tggcaagtttgtagacccgaa

SEQ ID NO: 1359 - DNA, 19 bp, Artificial
  Synthetic oligonucleotide
ggtagggtccaggccagag

SEQ ID NO: 1360 - DNA, 101 bp, Artificial
  Synthetic oligonucleotide
tggcaagtttgtagacccgaaatgcaggctgcatggggacgagccccatggctgaccctgtgcctgctgggcgccagcatggctctggcctggaccctacc

SEQ ID NO: 1361 - DNA, 18 bp, Artificial
  Synthetic oligonucleotide
cctttgccctgggaatcc

SEQ ID NO: 1362 - DNA, 16 bp, Artificial
  Synthetic oligonucleotide
gccctgctggccacac

SEQ ID NO: 1363 - DNA, 125 bp, Artificial
  Synthetic oligonucleotide
cctttgccctgggaatccagtggattgtagttagaatactagggggcatcccggggcccatcgccttcggctgggtgatcgacaaggcctgtctgctgtggcaggaccagtgtggccagcagggc

SEQ ID NO: 1364 - DNA, 21 bp, Artificial
  Synthetic oligonucleotide
ccgtgatggatgtggagtctc

SEQ ID NO: 1365 - DNA, 20 bp, Artificial
  Synthetic oligonucleotide
gcatcggaagcaaatgcatt

SEQ ID NO: 1366 - DNA, 111 bp, Artificial
  Synthetic oligonucleotide
ccgtgatggatgtggagtctcggctttctgacaacgtcttccagagcaggctttctctagagggtggactgcctgtgttctcctgggagagaatgcatttgcttccgatgc

SEQ ID NO: 1367 - DNA, 19 bp, Artificial
  Synthetic oligonucleotide
gcttgccctttcatgtgga

SEQ ID NO: 1368 - DNA, 23 bp, Artificial
  Synthetic oligonucleotide
tcacgatgagacctgacactctg

SEQ ID NO: 1369 - DNA, 111 bp, Artificial
  Synthetic oligonucleotide
gcttgccctttcatgtggagcactgtgattggacccaagttggcaagagtggaagaccaggggacagaacagaaatccccatggtggccagagtgtcaggtctcatcgtga

SEQ ID NO: 1370 - DNA, 18 bp, Artificial
  Synthetic oligonucleotide
gtgcccagtccccctgtc

SEQ ID NO: 1371 - DNA, 19 bp, Artificial
  Synthetic oligonucleotide
cctggcccgtttaactgga

SEQ ID NO: 1372 - DNA, 93 bp, Artificial
  Synthetic oligonucleotide
gtgcccagtccccctgtcagaccctcaatgactgaggcctgggggatccctcccttacctcagcttctcccatttccagttaaacgggccagg

SEQ ID NO: 1373 - DNA, 19 bp, Artificial
  Synthetic oligonucleotide
agcaaggacgcgactctcc

SEQ ID NO: 1374 - DNA, 21 bp, Artificial
  Synthetic oligonucleotide
aatccagcgtctaagcagctg

SEQ ID NO: 1375 - DNA, 121 bp, Artificial
  Synthetic oligonucleotide
agcaaggacgcgactctcccgacgcggggaggctattctgcccatttggggacacttccccgccgctgccaggacccgcttctctgaaaggctctccttgcagctgcttagacgctggatt

SEQ ID NO: 1376 - DNA, 24 bp, Artificial
  Synthetic oligonucleotide
tgcctactgattcatccacataca

SEQ ID NO: 1377 - DNA, 15 bp, Artificial
  Synthetic oligonucleotide
gcattccccggctgc

SEQ ID NO: 1378 - DNA, 125 bp, Artificial
  Synthetic oligonucleotide
tgcctactgattcatccacatacaattctcagcgtatatccaaatgcagtcaacattcctctctcagaaatacccacccacctctaactctgcattcatacatttaggctgcagccggggaatgc

SEQ ID NO: 1379 - DNA, 26 bp, Artificial
  Synthetic oligonucleotide
taagtctacaggtggtcaaaatgctg

SEQ ID NO: 1380 - DNA, 18 bp, Artificial
  Synthetic oligonucleotide
ggagcgccctctgtttcc

SEQ ID NO: 1381 - DNA, 138 bp, Artificial
  Synthetic oligonucleotide
taagtctacaggtggtcaaaatgctgtatccacccaattccactaaatggaataaatgaataaatgaatgaattcatttattccatttcctcagttcctccccaaattacacctctgccaggaaacagagggcgctcc

SEQ ID NO: 1382 - protein, 344 aa, Homo sapiens
MGPPSAPPCRLHVPWKEVLLTASLLTFWNPPTTAKLTIESTPFNVAEGKEVLLLAHNLPQNRIGYSWYKGERVDGNSLIVGYVIGTQQATPGPAYSGRETIYPNASLLIQNVTQNDTGFYTLQVIKSDLVNEEATGQFHVYPELPKPSISSNNSNPVEDKDAVAFTCEPEVQNTTYLWWVNGQSLPVSPRLQLSNGNMTLTLLSVKRNDAGSYECEIQNPASANRSDPVTLNVLYGPDGPTISPSKANYRPGENLNLSCHAASNPPAQYSWFINGTFQQSTQELFIPNITVNNSGSYMCQAHNSATGLNRTTVTMITVSGSAPVLSAVATVGITIGVLARVALI

SEQ ID NO: 1383 - DNA, 123 bp, Homo sapiens; identical to SEQ ID NO: 1330

SEQ ID NO: 1384 - protein, 295 aa, Homo sapiens
MLQGPGSLLLLFLASHCCLGSARGLFLFGQPDFSYKRSNCKPIPANLQLCHGIEYQNMRLPNLLGHETMKEVLEQAGAWIPLVMKQCHPDTKKFLCSLFAPVCLDDLDETIQPCHSLCVQVKDRCAPVMSAFGFPWPDMLECDRFPQDNDLCIPLASSDHLLPATEEAPKVCEACKNKNDDDNDIMETLCKNDFALKIKVKEITYINRDTKIILETKSKTIYKLNGVSERDLKKSVLWLKDSLQCTCEEMNDINAPYLVMGQKQGGELVITSVKRWQKGQREFKRISRSIRKLQC

SEQ ID NO: 1385 - protein, 504 aa, Homo sapiens
MTPSPLLLLLLPPLLLGAFPPAAAARGPPKMADKVVPRQVARLGRTVRLQCPVEGDPPPLTMWTKDGRTIHSGWSRFRVLPQGLKVKQVEREDAGVYVCKATNGFGSLSVNYTLVVLDDISPGKESLGPDSSSGGQEDPASQQWARPRFTQPSKMRRRVIARPVGSSVRLKCVASGHPRPDITWMKDDQALTRPEAAEPRKKKWTLSLKNLRPEDSGKYTCRVSNRAGAINATYKVDVIQRTRSKPVLTGTHPVNTTVDFGGTTSFQCKVRSDVKPVIQWLKRVEYGAEGRHNSTIDVGGQKFVVLPTGDVWSRPDGSYLNKLLITRARQDDAGMYICLGANTMGYSFRSAFLTVLPDPKPPGPPVASSSSATSLPWPVVIGIPAGAVFILGTLLLWLCQAQKKPCTPAPAPPLPGHRPPGTARDRSGDKDLPSLAALSAGPGVGLCEEHGSPAAPQHLLGPGPVAGPKLYPKLYTDIHTHTHTHSHTHSHVEGKVHQHIHYQC

SEQ ID NO: 1386 - protein, 504 aa, Homo sapiens
MTPSPLLLLLLPPLLLGAFPPAAAARGPPKMADKVVPRQVARLGRTVRLQCPVEGDPPPLTMWTKDGRTIHSGWSRFRVLPQGLKVKQVEREDAGVYVCKATNGFGSLSVNYTLVVLDDISPGKESLGPDSSSGGQEDPASQQWARPRFTQPSKMRRRVIARPVGSSVRLKCVASGHPRPDITWMKDDQALTRPEAAEPRKKKWTLSLKNLRPEDSGKYTCRVSNRAGAINATYKVDVIQRTRSKPVLTGTHPVNTTVDFGGTTSFQCKVRSDVKPVIQWLKRVEYGAEGRHNSTIDVGGQKFVVLPTGDVWSRPDGSYLNKLLITRARQDDAGMYICLGANTMGYSFRSAFLTVLPDPKPQGPPVASSSSATSLPWPVVIGIPAGAVFILGTLLLWLCQAQKKPCTPAPAPPLPGHRPPGTARDRSGDKDLPSLAALSAGPGVGLCEEHGSPAAPQHLLGPGPVAGPKLYPKLYTDIHTHTHTHSHTHSHVEGKVHQHIHYQC

SEQ ID NO: 1387 - protein, 350 aa, Homo sapiens
NPCKQVSQIKYAANNGVQMMTFDSEVELMKVARAHPKAKLVLRIATDDSKAVCRLSVKFGATLRTSRLLLERAKELNIDVVGVSFHVGSGCTDPETFVQAISDARCVFDMGAEVGFSMYLLDIGGGFPGSEDVKLKFEEITGVINPALDKYFPSDSGVRIIAEPGRYYVASAFTLAVNIIAKKIVLKEQTGSDDEDESSEQTFMYYVNDGVYGSFNCILYDHAHVKPLLQKRPKPDEKYYSSSIWGPTCDGLDRIVERCDLPEMHVGDWMLFENMGAYTVAAASTFNGFQRPTIYYVMSGPAWQLMQQFQNPDFPPEVEEQDASTLPVSCAWESGMKRHRAACASASINV

SEQ ID NO: 1388 - protein, 396 aa, Homo sapiens
MQLKCNDSKAIVKTLAATGTGFDCASKTEIQLVQSLGVPPERIIYANPCKQVSQIKYAANNGVQMMTFDSEVELMKVARAHPKAKLVLRIATDDSKAVCRLSVKFGATLRTSRLLLERAKELNIDVVGVSFHVGSGCTDPETFVQAISDARCVFDMGAEVGFSMYLLDIGGGFPGSEDVKLKFEEITGVINPALDKYFPSDSGVRIIAEPGRYYVASAFTLAVNIIAKKIVLKEQTGSDDEDESSEQTFMYYVNDGVYGSFNCILYDHAHVKPLLQKRPKPDEKYYSSSIWGPTCDGLDRIVERCDLPEMHVGDWMLFENMGAYTVAAASTFNGFQRPTIYYVMSGPAWQLMQQFQNPDFPPEVEEQDASTLPVSCAWESGMKRHRAACASASINV

SEQ ID NO: 1389 - protein, 216 aa, Homo sapiens
MRPRSGPTRNPRLRAFAGVPTRGRTRGQSRRCAAEASAGPERDARPGAPAAGTMGAAHSASEEVRELEGKTGFSSDQIEQLHRRFKQLSGDQPTIRKENFNNVPDLELNPIRSKIVRAFFDNRNLRKGPSGLADEINFEDFLTIMSYFRPIDTTMDEEQVELSRKEKLRFLFHMYDSDSDGRITLEEYRNVKWSRSCCRETLTSRRSPLAPSPTGP

SEQ ID NO: 1390 - protein, 172 aa, Homo sapiens
MPGSRKLEYGGQTWHEHCFLCSGCEQPLGSRSFVPDKGAHYCVPCYENKFAPRCARCSKTLTQGGVTYRDQPWHRECLVCTGCQTPLAGQQFTSRDEDPYCVACFGELFAPKCSSCKRPIVGLGGGKYVSFEDRHWHHNCFSCARCSTSLVGQGFVPDGDQVLCQGCSQAGP

SEQ ID NO: 1391 - protein, 280 aa, Homo sapiens
MSESFDCAKCNESLYGRKYIQTDSGPYCVPCYDNTFANTCAECQQLIGHDSRELFYEDRHFHEGCFRCCRCQRSLADEPFTCQDSELLCNDCYCSAFSSQCSACGETVMPGSRKLEYGGQTWHEHCFLCSGCEQPLGSRSFVPDKGAHYCVPCYENKFAPRCARCSKTLTQGGVTYRDQPWHRECLVCTGCQTPLAGQQFTSRDEDPYCVACFGELFAPKCSSCKRPIVGLGGGKYVSFEDRHWHHNCFSCARCSTSLVGQGFVPDGDQVLCQGCSQAGP

SEQ ID NO: 1392 - protein, 133 aa, Homo sapiens [sequence omitted]

SEQ ID NO: 1393 - protein, 112 aa, Homo sapiens; identical to SEQ ID NO: 603

SEQ ID NO: 1394 - protein, 141 aa, Homo sapiens
MWVLGIAATFCGLFLLPGFALQIQCYQCEEFQLNNDCSSPEFIVNCTVNVQDMCQKEVMEQSAGIMYRKSCASSAACLIASAGYQSFCSPGKLNSVCISCCNTPLCNGPRPKKRGSSASALRPGLRTTILFLKLALFSAHC

SEQ ID NO: 1395 - protein, 165 aa, Homo sapiens
MWVLGIAATFCGLFLLPGFALQIQCYQCEEFQLNNDCSSPEFIVNCTVNVQDMCQKEVMEQSAGIMYRKSCASSAACLIASAGYQSFCSPGKLNSVCISCCNTPLCNGPRPKKRGSSASALRPGLRTTILFLKLASSRHTAELKEMPPPPALFFQPSPPTPHLPE

SEQ ID NO: 1396 - protein, 164 aa, Homo sapiens [sequence omitted]

SEQ ID NO: 1397 - protein, 157 aa, Homo sapiens
MQAPRAAPAAPLSYDRRLRGSIAATFCGLFLLPGFALQIQCYQCEEFQLNNDCSSPEFIVNCTVNVQDMCQKEVMEQSAGIMYRKSCASSAACLIASAGYQSFCSPGKLNSVCISCCNTPLCNGPRPKKRGSSASALRPGLRTTILFLKLALFSAHC

SEQ ID NO: 1398 - DNA, 50 bp, Homo sapiens
gacatctttgcatatcatgtcagagctataacatcattgtggagaagctc

SEQ ID NO: 1399 - DNA, 50 bp, Homo sapiens
gtcatgaaaatcaacaccgaggtgcggagcttcggacctgtgtcccgcag

SEQ ID NO: 1400 - DNA, 50 bp, Homo sapiens
atgcgggcatgtacatctgccttggcgccaacaccatgggctacagcttc

SEQ ID NO: 1401 - DNA, 50 bp, Homo sapiens
gggtctggggtgctctcctggtctttgtgtcggcgttcccctccctacct

SEQ ID NO: 1402 - DNA, 50 bp, Homo sapiens
tgaagagtgtgaggaaaacctatgtttgccgcttaagctttcagctcagc

SEQ ID NO: 1403 - DNA, 50 bp, Homo sapiens
gcagaaactttgcagtaacaccttcagtgagttcaaggctaggatccctg

SEQ ID NO: 1404 - DNA, 50 bp, Homo sapiens
ccaaggctcgtctgcgcaccttgtgtcttgtagggtatggtatgtgggac

SEQ ID NO: 1405 - DNA, 50 bp, Homo sapiens
cacagagccaggatgttcttctgacctcagtatctactccagctccagct

SEQ ID NO: 1406 - DNA, 50 bp, Homo sapiens
tggcatgctggaacatggactctagctagcaagaagggctcaaggaggtg

SEQ ID NO: 1407 - DNA, 50 bp, Homo sapiens
aaaagcatgagtttctgaccagcgttctggacgcgctgtccacggacatg

SEQ ID NO: 1408 - DNA, 50 bp, Homo sapiens
atgttcttaggaggcaagccaggagaagccgggtctgacttttcagctca

SEQ ID NO: 1409 - DNA, 50 bp, Homo sapiens
tcctccagacccaaagccacaacccatcgcaagtcaagaacactttccag

SEQ ID NO: 1410 - DNA, 50 bp, Homo sapiens
aactctggcaccttgggctgtggaaggctctggaaagtccttcaaagctg

SEQ ID NO: 1411 - DNA, 50 bp, Homo sapiens
gctgcaatctaagtttcggaatacttataccactccagaaataatcctcg

SEQ ID NO: 1412 - DNA, 50 bp, Homo sapiens
ttcagaactgttaacatcgctgacgggaagtggcatcgggtagcaatcag

SEQ ID NO: 1413 - DNA, 50 bp, Homo sapiens
ctcaaaatgaaactccctctcgcagagcacaattccaattcgctctaaaa

SEQ ID NO: 1414 - DNA, 50 bp, Homo sapiens
aaggaagcaggaccagtggatgtgaggcgtggtcgaagaacaacagaaag

SEQ ID NO: 1415 - DNA, 50 bp, Homo sapiens
acaggggccagatggtgacccatgacccagcctaaaaggcagccagaggg

SEQ ID NO: 1416 - DNA, 50 bp, Homo sapiens
gaggcccctgggtgggaatggggacaggaattgacagtggaaggggttct

SEQ ID NO: 1417 - DNA, 50 bp, Homo sapiens
tgactccctacatactccaggactagcttaggtcccaacccaatagttcc

SEQ ID NO: 1418 - DNA, 50 bp, Homo sapiens
tggtccccatgtgattctccgaggatcctgagggtcgtggtttatggaga

SEQ ID NO: 1419 - DNA, 50 bp, Homo sapiens
acgtgatggttggaacgcgtaccttagagcttccagttccgtcttaggac

SEQ ID NO: 1420 - DNA, 50 bp, Homo sapiens
atccccactgaacccagtgctttcaccagccatattagctcccactcacc

SEQ ID NO: 1421 - DNA, 50 bp, Homo sapiens
caccgcatgctgccaatctgatggtggagacagaacagcagtcccggatg

SEQ ID NO: 1422 - DNA, 50 bp, Homo sapiens
tttccacactcagtgccacgaagtgcagctctaagctggggatttctgtg

SEQ ID NO: 1423 - DNA, 50 bp, Homo sapiens
acccagctccatgtgcgttctcagggaatggacgccagtgtactgccaat

SEQ ID NO: 1424 - DNA, 50 bp, Homo sapiens; identical to SEQ ID NO: 1331

SEQ ID NO: 1425 - DNA, 50 bp, Homo sapiens; identical to SEQ ID NO: 1332

SEQ ID NO: 1426 - DNA, 50 bp, Homo sapiens; identical to SEQ ID NO: 1334

SEQ ID NO: 1427 - DNA, 50 bp, Homo sapiens; identical to SEQ ID NO: 1333

SEQ ID NO: 1428 - DNA, 50 bp, Homo sapiens; identical to SEQ ID NO: 1338

SEQ ID NO: 1429 - DNA, 50 bp, Homo sapiens
cctggtgggagcccatgagaagcgagttctctgtgcaacggacttagtaa

SEQ ID NO: 1430 - DNA, 50 bp, Homo sapiens
gctccctggagcatcagcatcatattctggggtggagtctatctggttct

SEQ ID NO: 1431 - DNA, 50 bp, Homo sapiens; identical to SEQ ID NO: 1339

SEQ ID NO: 1432 - DNA, 50 bp, Homo sapiens
tttaacacaggattgggacaggattcagagggacactgtggcccttctac

SEQ ID NO: 1433 - DNA, 50 bp, Homo sapiens
ccatccacatttatggaaacacttgctgtatatctggtgatttacgtgtg

SEQ ID NO: 1434 - DNA, 50 bp, Homo sapiens
cctttcaccactgtgtgcaagcgaatacacgcggaacaatcctagtgaat

SEQ ID NO: 1435 - DNA, 50 bp, Homo sapiens
tttgctagaaatctggtgtggtgcaggagcgactccaggattcactctgt

SEQ ID NO: 1436 - DNA, 50 bp, Homo sapiens
tccgtgaccctcagagatcctttgccctgggaatccagtggattgtagtt

SEQ ID NO: 1437 - DNA, 50 bp, Homo sapiens
cccatggtggccagagtgtcaggtctcatcgtgacgctcttgtcctcctc

SEQ ID NO: 1438 - DNA, 50 bp, Homo sapiens
ggggctgtgcccagtccccctgtcagaccctcaatgactgaggcctgggg

SEQ ID NO: 1439 - DNA, 50 bp, Homo sapiens
actttgcactggaacttacaacacccgagcaaggacgcgactctcccgac

SEQ ID NO: 1440 - DNA, 50 bp, Homo sapiens
gcctactgattcatccacatacaattctcagcgtatatccaaatgcagtc

SEQ ID NO: 1441 - DNA, 50 bp, Homo sapiens
ggacctctaagtctacaggtggtcaaaatgctgtatccacccaattccac

SEQ ID NO: 1442 - protein, 18 aa, Artificial
  Synthetic peptide
EIPLMPTVERSQEARCYP

SEQ ID NO: 1443 - protein, 19 aa, Artificial
  Synthetic peptide
NWRKNSVKQNQDTTPSQGA

SEQ ID NO: 1444 - protein, 11 aa, Artificial
  Synthetic peptide
YDGPPQMYFAY

SEQ ID NO: 1445 - protein, 4 aa, Artificial
  Synthetic peptide
PTPG

SEQ ID NO: 1446 - protein, 53 aa, Artificial
  Synthetic peptide
SFSHTSSPDLTNQLNHIFLEVKSFSFSTQPLFLWNWRKNSVKQNQDTTPSQGA

SEQ ID NO: 1447 - protein, 7 aa, Artificial
  Synthetic peptide
KSPVSEY

SEQ ID NO: 1448 - protein, 6 aa, Artificial
  Synthetic peptide
TGEKTQ

SEQ ID NO: 1449 - protein, 25 aa, Artificial
  Synthetic peptide
VRKTPSHDLWKQKHLCQSSWNPLLH

SEQ ID NO: 1450 - protein, 28 aa, Artificial
  Synthetic peptide
MHHSDWGNIMWIFQMSPLQNFRKEERNQ

SEQ ID NO: 1451 - protein, 51 aa, Artificial
  Synthetic peptide
GMGWGGLCCTGSGGPRRLSPCTQPLCTEHGTEAIFVAAVGIRPSHHAAAQS

SEQ ID NO: 1452 - protein, 50 aa, Artificial
  Synthetic peptide
SEHLCPEGQGEVEGNTGLGVMDRGFPGTHLRSSQFWALQAWESVHYWESV

SEQ ID NO: 1453 - protein, 17 aa, Artificial
  Synthetic peptide
CESQGGCAQSPCQTLND

SEQ ID NO: 1454 - protein, 11 aa, Artificial
  Synthetic peptide
GEPGVGAEGMR

SEQ ID NO: 1455 - protein, 25 aa, Artificial
  Synthetic peptide
FQLPEVHHSLNVLNRKFQKQTVHNL

SEQ ID NO: 1456 - protein, 7 aa, Artificial
  Synthetic peptide
TIKHKAF

SEQ ID NO: 1457 - protein, 7 aa, Artificial
  Synthetic peptide
TIKHKAF

SEQ ID NO: 1458 - protein, 73 aa, Artificial
  Synthetic peptide
SGAAAYRPCPPLDPGKGPPCLPLVIGAIVGLPRCTETVAVSLRIFPLVLAMPLQGNALQLVRESPSFWFSYSL

SEQ ID NO: 1459 - protein, 13 aa, Artificial
  Synthetic peptide
QHSCTNGNSTMCP

SEQ ID NO: 1460 - protein, 7 aa, Artificial
  Synthetic peptide
ASCPKAT

SEQ ID NO: 1461 - protein, 9 aa, Artificial
  Synthetic peptide
EEENEFRRL

SEQ ID NO: 1462 - protein, 30 aa, Artificial
  Synthetic peptide
MGTSPMADPVPAGRQHGSGLDPTTRLSPLC

SEQ ID NO: 1463 - protein, 5 aa, Artificial
  Synthetic peptide
MWTAR

SEQ ID NO: 1464 - protein, 114 aa, Artificial
  Synthetic peptide
SGAAAYRPCPPLDPGKGPPCLPLVIGAIVGLPRCTETVAVSLRIFPLVLAMHCREMHFNLSEKAPPSGFHIRCNFLYIPQQHSCTNGNSTVSWGRVCACPELSLQHPEAELCRS

SEQ ID NO: 1465 - protein, 384 aa, Artificial
  Synthetic peptide
NWLVRHPDCINVPDWRGAICSGCYAQMYIQAYKTSNLRMKIIKNDFPSHPLYLEGALTRSTHYQQYQPVVTLQKGYTIHWDQTAPAELAIWLINFNKGDWIRVGLCYPRGTTFSILSDVHNRLLKQTSKTGVFVRTLQMDKVEQSYPGRSHYYWDEDSGLLFLKLKAQNEREKFAFCSMKGCERIKIKALIPKNAGVSDCTATAYPKFTERAVVDVPMPKKLFGSQLKTKDHFLEVKMESSKQHFFHLWNDFAYIEVDGKKYPSSEDGIQVVVIDGNQGRVVSHTSFRNSILQGIPWQLFNYVATIPDNSIVLMASKGRYVSRGPWTRVLEKLGADRGLKLKEQMAFVGFKGSFRPIWVTLDTEDHKAKIFQVVPIPVVKKKKL

SEQ ID NO: 1466 - protein, 91 aa, Artificial
  Synthetic peptide
MYLHIGEEIDGVDMRAEVGLLSRNIIVMGEMEDKCYPYRNHICNFFDFDTFGGHIKFALGFKAAHLEGTELKHMGQQLVGQYPIHFHLAGD

SEQ ID NO: 1467 - protein, 384 aa, Artificial; identical to SEQ ID NO: 1465
  Synthetic peptide

SEQ ID NO: 1468 - protein, 199 aa, Artificial
  Synthetic peptide
MDGVNLSTEVVYKKGQDYRFACYDRGRACRSYRVRFLCGKPVRPKLTVTIDTNVNSTILNLEDNVQSWKPGDTLVIASTDYSMYQAEEFQVLPCRSCAPNQVKVAGKPMYLHIGEEIDGVDMRAEVGLLSRNIIVMGEMEDKCYPYRNHICNFFDFDTFGGHIKFALGFKAAHLEGTELKHMGQQLVGQYPIHFHLAGD

SEQ ID NO: 1469 - protein, 348 aa, Artificial
  Synthetic peptide
MGAAGRQDFLFKAMLTISWLTLTCFPGATSTVAAGCPDQSPELQPWNPGHDQDHHVHIGQGKTLLLTSSATVYSIHISEGGKLVIKDHDEPIVLRTRHILIDNGGELHAGSALCPFQGNFTIILYGRADEGIQPDPYYGLKYIGVGKGGALELHGQKKLSWTFLNKTLHPGGMAEGGYFFERSWGHRGVIVHVIDPKSGTVIHSDRFDTYRSKKESERLVQYLNAVPDGRILSVAVNDEGSRNLDDMARKAMTKLGSKHFLHLGFRHPWSFLTVKGNPSSSVEDHIEYHGHRGSAAARVFKLFQTEHGEYFNVSLSSEWVQDVEWTEWFDHDKVSQTKGGEKISDLWK

SEQ ID NO: 1470 - protein, 8 aa, Artificial
  Synthetic peptide
KQRTISWR

SEQ ID NO: 1471 - protein, 348 aa, Artificial; identical to SEQ ID NO: 1469
  Synthetic peptide

SEQ ID NO: 1472 - protein, 159 aa, Artificial
  Synthetic peptide
NWLVRHPDCINVPDWRGAICSGCYAQMYIQAYKTSNLRMKIIKNDFPSHPLYLEGALTRSTHYQQYQPVVTLQKGYTIHWDQTAPAELAIWLINFNKGDWIRVGLCYPRGTTFSILSDVHNRLLKQTSKTGVFVRTLQMDKVEQSYPGRSHYYWDEDSG

SEQ ID NO: 1473 - protein, 8 aa, Artificial
  Synthetic peptide
GEEFQTIW

SEQ ID NO: 1474 - protein, 9 aa, Artificial
  Synthetic peptide
MSDKLPYKV

SEQ ID NO: 1475 - protein, 81 aa, Artificial
  Synthetic peptide
CEYICSSLAQAASPNPQGQRQDFSVPLRFKYTDPQPWTSRLSVTFCPRKTWADQVLTKNRRGGAASVLGGSGSTPYDGRNR

SEQ ID NO: 1476 - protein, 44 aa, Artificial
  Synthetic peptide
GKWLPGASASYSGVESIWFSPKSQEDIFFPSLCSMGTRKSQILS

SEQ ID NO: 1477 - protein, 47 aa, Artificial
  Synthetic peptide
MLRPRCLLRRTAHPPHSAPAPAPARSKCLGSWSNVLIRESSVWSLRL

SEQ ID NO: 1478 - protein, 6 aa, Artificial
  Synthetic peptide
HGGSRL

SEQ ID NO: 1479 - protein, 27 aa, Artificial
  Synthetic peptide
MSDLFIGFLVCSLSPLGTGTRCSCSPG

SEQ ID NO: 1480 - protein, 20 aa, Artificial
  Synthetic peptide
VPIGWVLSPSPTSLRAPLPG

SEQ ID NO: 1481 - protein, 31 aa, Artificial
  Synthetic peptide
ERQDLTMLSRLVLNSWPQMILPPQPPKVLEL

SEQ ID NO: 1482 - protein, 5 aa, Artificial
  Synthetic peptide
DWTRP

SEQ ID NO: 1483 - protein, 22 aa, Artificial
  Synthetic peptide
LLLSSQLWPPSASRLECWPGWL

SEQ ID NO: 1484 - protein, 70 aa, Artificial
  Synthetic peptide
KWIHEALASHFQVESGSQRRARKKFSFPTCVQGAHANPKFSPEPSQFTSADSFPLVFLFFVVFCFLISHV

SEQ ID NO: 1485 - protein, 42 aa, Artificial
  Synthetic peptide
REYFHMTSGCWGSVLLPTYGIVRPGLCLWPSLHYILYQGLDI

SEQ ID NO: 1486 - protein, 13 aa, Artificial
  Synthetic peptide
GKPSLLLPHSLLG

SEQ ID NO: 1487 - protein, 80 aa, Artificial
  Synthetic peptide
GARLPRHATPCWCPDPPPGPGVPPTGWGPTLPSRAVLARSSAEGGQPRGTVSTAPGMGLGCSPGLCVGVPLPTSFPLALA

SEQ ID NO: 1488 - protein, 221 aa, Artificial
  Synthetic peptide
TQNRQGHLWPPRPRPLACRGPWSSASQPALSSSWAPCSCGFARPRRSRAPPRLPLPCLGTARRGRPATAAETRTFPRWPPSALALVWGCVRSMGLRQPPSTYWAQAQLLALSCTPNSTQTSTHTHTHTLTHTHTWRARSTSTSTISARRHRICSGHGGAGQTGRLGGWRTELQTKAGDPWRGGMASTPGSLCVRHSPWTHTHRHTHYLDACMHTHARTRAP

SEQ ID NO: 1489 - protein, 37 aa, Artificial
  Synthetic peptide
SHTQEWEESLSQPRIPHGSENHRKDTEQGEHQLTGEK

SEQ ID NO: 1490 - protein, 103 aa, Artificial
  Synthetic peptide
MHKKGSPILGSHTARVAGTSPPALPLLAQLPDASAEPHGPRHALRRPQQSPAPAGGAAAPAPGGRQPARSRWVPAPWGPRAGRGWGGRPAPTAPLNQRVYSSL

SEQ ID NO: 1491 - protein, 29 aa, Artificial
  Synthetic peptide
MKSLTATSSMKVLLPRTFWTRKLMKFLLL

SEQ ID NO: 1492 - protein, 44 aa, Artificial
  Synthetic peptide
MAEKALLCPSSAGLGTWPWVLNSAWPVLPLAVDQGVDWRPRGPV

SEQ ID NO: 1493 - protein, 76 aa, Artificial
  Synthetic peptide
VEELLSGNPHIEKESARSIADGAMMEAASVCMGQMEPDQVYEGITFEDFLKIWQGIDIETKMHVRFLNMETMALCH

SEQ ID NO: 1494 - protein, 130 aa, Artificial
  Synthetic peptide
GGGGRADWRPKGRWGRGLAPAAGWGAGVRGPGGAGPRSLPRGGVGAALPLAHTVRLQSAASPAARSAPAWPGPQELFYEDRHFHEGCFRCCRCQRSLADEPFTCQDSELLCNDCYCSAFSSQCSACGETV

SEQ ID NO: 1495 - protein, 34 aa, Artificial
  Synthetic peptide
MNPSPARTVSCSAMTATAVRFPRSAPLVGRLSCL

SEQ ID NO: 1496 - protein, 99 aa, Artificial
  Synthetic peptide
VRWATLELYLIGYYYCSFSQACSKKPSPPLRAVEAGTREWLWVRVVSGGNFLCSGFGLTQAGTQILPYRLHDCGQITFSKCNCKTGINNTNLVGLLGSL

SEQ ID NO: 1497 - protein, 62 aa, Artificial
  Synthetic peptide
DVLTAWPSIYRRQVKVLREDEITILPWHLQWSREKATKLLRPTLPSYNNHGWEELRVGKSIV

SEQ ID NO: 1498 - protein, 10 aa, Artificial
  Synthetic peptide
MEKLQLRNVK

SEQ ID NO: 1499 - protein, 11 aa, Artificial
  Synthetic peptide
AHILITFPLPS

SEQ ID NO: 1500 - protein, 23 aa, Artificial
  Synthetic peptide
DAMVVSSRPKATTHRKSRTLSRR

SEQ ID NO: 1501 - protein, 6 aa, Artificial
  Synthetic peptide
RSKRNL

SEQ ID NO: 1502 - protein, 13 aa, Artificial
  Synthetic peptide
LLWLRGKVSFYCF

SEQ ID NO: 1503 - protein, 8 aa, Artificial
  Synthetic peptide
GKQGMRAH

SEQ ID NO: 1504 - protein, 25 aa, Artificial
  Synthetic peptide
GEKRHHKQLRDQEVDPLEMRRHSAG

SEQ ID NO: 1505 - protein, 8 aa, Artificial
  Synthetic peptide
RGSLGSAQ

SEQ ID NO: 1506 - protein, 28 aa, Artificial
  Synthetic peptide
GSMKSISEFLVLLSELKWMMLSKFVLKI

SEQ ID NO: 1507 - protein, 12 aa, Artificial
  Synthetic peptide
DVPHPWVWKMER

SEQ ID NO: 1508 - protein, 16 aa, Artificial
  Synthetic peptide
SKSEYYFCSSVFHSCG

SEQ ID NO: 1509 - protein, 33 aa, Artificial
  Synthetic peptide
VTVEGPLEDPSELEVDIDYFMKHSKDHTSTPNP

SEQ ID NO: 1510 - protein, 73 aa, Artificial
  Synthetic peptide
MWTFVTQLLVTLVLLSFFLVSCQNVMHIVRGSLCFVLKHIHQELDKELGESEGLSDDEETISTRVVRRRVFLK

SEQ ID NO: 1511 - protein, 46 aa, Artificial
  Synthetic peptide
VTVEGPLEDPSELEVELRGSGLQPDLIEGRKGAQIVKRASLKRGKQ

SEQ ID NO: 1512 - protein, 14 aa, Artificial
  Synthetic peptide
EVTVEGPLEDPSEL

SEQ ID NO: 1513 - protein, 57 aa, Artificial
  Synthetic peptide
VTVEGPLEDPSELEVDIDYFMKHSKVELRGSGLQPDLIEGRKGAQIVKRASLKRGKQ

SEQ ID NO: 1514 - protein, 25 aa, Artificial
  Synthetic peptide
VTVEGPLEDPSELEVDIDYFMKHSK

SEQ ID NO: 1515 - protein, 22 aa, Artificial
  Synthetic peptide
VTVEGPLEDPSELEDHTSTPNP

SEQ ID NO: 1516 - protein, 21 aa, Artificial
  Synthetic peptide
VGAECSPLCWGEAGGLEAKRW

SEQ ID NO: 1517 - protein, 32 aa, Artificial
  Synthetic peptide
VELRGSGLQPDLIEGRKGAQIVKRASLKRGKQ

SEQ ID NO: 1518 - protein, 8 aa, Artificial
  Synthetic peptide
DHTSTPNP

SEQ ID NO: 1519 - protein, 32 aa, Artificial; identical to SEQ ID NO: 1517
  Synthetic peptide

SEQ ID NO: 1520 - protein, 17 aa, Artificial
  Synthetic peptide
GPRAPRLAPPSGLCPGQ

SEQ ID NO: 1521 - protein, 25 aa, Artificial
  Synthetic peptide
VSMMIINSQTIMVVNYSSSFITLML

SEQ ID NO: 1522 - protein, 15 aa, Artificial
  Synthetic peptide
MCCNLSFGILIPLQK

SEQ ID NO: 1523 - protein, 42 aa, Artificial
  Synthetic peptide
VSFSFSLFYKKVIKFACDKRFVGRHDERKVVKLSLPLYLIYE

SEQ ID NO: 1524 - protein, 13 aa, Artificial
  Synthetic peptide
VRSTRPEKVFVFQ

SEQ ID NO: 1525 - protein, 5 aa, Artificial
  Synthetic peptide
GKAGV

SEQ ID NO: 1526 - protein, 31 aa, Artificial
  Synthetic peptide
PGLERGADKFPVVGGSSLFLALDLTLRPPVG

SEQ ID NO: 1527 - protein, 17 aa, Artificial
  Synthetic peptide
VWAATGRRVARVGMLSL

SEQ ID NO: 1528 - protein, 12 aa, Artificial
  Synthetic peptide
LWTSLLALTIPS

SEQ ID NO: 1529 - protein, 17 aa, Artificial
  Synthetic peptide
VWAATGRRVARVGMLSL

SEQ ID NO: 1530 - protein, 26 aa, Artificial
  Synthetic peptide
MLARAARGTGALLLRGSLLASGRAPR

SEQ ID NO: 1531 - protein, 88 aa, Artificial
  Synthetic peptide
NGDAAASLTVAEQYVSAFSKLAKDSNTILLPSNPGDVTSMVAQAMGVYGALTKAPVPGTPDSLSSGSSRDVQGTDASLDEELDRVKMS

SEQ ID NO: 1532 - protein, 26 aa, Artificial
  Synthetic peptide
MLARAARGTGALLLRGSLLASGRAPR

SEQ ID NO: 1533 - protein, 4 aa, Artificial
  Synthetic peptide
VRAL

SEQ ID NO: 1534 - protein, 26 aa, Artificial
  Synthetic peptide
MLARAARGTGALLLRGSLLASGRAPR

SEQ ID NO: 1535 - protein, 22 aa, Artificial
  Synthetic peptide
VRGPWVGMGTGIDSGRGSLIYA

SEQ ID NO: 1536 - protein, 26 aa, Artificial
  Synthetic peptide
MLARAARGTGALLLRGSLLASGRAPR

SEQ ID NO: 1537 - protein, 88 aa, Artificial; identical to SEQ ID NO: 1531
  Synthetic peptide

SEQ ID NO: 1538 - protein, 41 aa, Artificial
  Synthetic peptide
AGQERVEAEGGARHGPLKIGAGAGSLGYFDFMGQASSVPSL

SEQ ID NO: 1539 - protein, 26 aa, Artificial
  Synthetic peptide
MLARAARGTGALLLRGSLLASGRAPR

SEQ ID NO: 1540 - protein, 45 aa, Artificial
  Synthetic peptide
AMGVYGALTKAPVPGTPDSLSSGSSRDVQGTDASLDEELDRVKMS

SEQ ID NO: 1541 - protein, 26 aa, Artificial
  Synthetic peptide
MLARAARGTGALLLRGSLLASGRAPR

SEQ ID NO: 1542 - protein, 22 aa, Artificial
  Synthetic peptide
VRGPWVGMGTGIDSGRGSLIYA

SEQ ID NO: 1543 - protein, 41 aa, Artificial; identical to SEQ ID NO: 1538
  Synthetic peptide

SEQ ID NO: 1544 - protein, 26 aa, Artificial
  Synthetic peptide
MLARAARGTGALLLRGSLLASGRAPR

SEQ ID NO: 1545 - protein, 35 aa, Artificial
  Synthetic peptide
VSRSEPELGFEDTNLTLLIFSEGQDQSQALLSVGP

SEQ ID NO: 1546 - protein, 26 aa, Artificial
  Synthetic peptide
MLARAARGTGALLLRGSLLASGRAPR

SEQ ID NO: 1547 - protein, 26 aa, Artificial
  Synthetic peptide
GAKEGWEKGLRAPVPGGSRLPSCYDG

SEQ ID NO: 1548 - protein, 26 aa, Artificial
  Synthetic peptide
MLARAARGTGALLLRGSLLASGRAPR

SEQ ID NO: 1549 - protein, 88 aa, Artificial; identical to SEQ ID NO: 1531
  Synthetic peptide

SEQ ID NO: 1550 - protein, 26 aa, Artificial
  Synthetic peptide
MLARAARGTGALLLRGSLLASGRAPR

SEQ ID NO: 1551 - protein, 26 aa, Artificial
  Synthetic peptide
MLARAARGTGALLLRGSLLASGRAPR

SEQ ID NO: 1552 - protein, 19 aa, Artificial
  Synthetic peptide
SRLTLQWEQQRCPGYRCKS

SEQ ID NO: 1553 - protein, 41 aa, Artificial
  Synthetic peptide
VRNLFCPPWASQMTNPSRHAMSGGLPLGLPALLAPDSVGQT

SEQ ID NO: 1554 - protein, 26 aa, Artificial
  Synthetic peptide
MLARAARGTGALLLRGSLLASGRAPR

SEQ ID NO: 1555 - protein, 11 aa, Artificial
  Synthetic peptide
ELLLFWACSMC

SEQ ID NO: 1556 - protein, 26 aa, Artificial
  Synthetic peptide
MLARAARGTGALLLRGSLLASGRAPR

SEQ ID NO: 1557 - protein, 17 aa, Artificial
  Synthetic peptide
GTGVPECQHCGCHQPSC

SEQ ID NO: 1558 - protein, 110 aa, Artificial
  Synthetic peptide
MWVLGIAATFCGLFLLPGFALQIQCYQCEEFQLNNDCSSPEFIVNCTVNVQDMCQKEVMEQSAGIMYRKSCASSAACLIASAGSPCRGLAPGREEQRALHKAGAVGGGVR

SEQ ID NO: 1559 - protein, 139 aa, Artificial
  Synthetic peptide
SPCRGLAPGREEQRALHKAGAVGGGVRMYAQALLVVGVLQRQAAAQHLHEHPPKLLRGHRVQERVDDRAEVEKRLREGEEDHVRPEVGPRPVVLGFGRSHDPPNLVGHPAYGQCHNNQPWADTSRRERQRKEKHSMRTQ

SEQ ID NO: 1560 - protein, 29 aa, Artificial
  Synthetic peptide
SHCVTRLECSGTISAHCNLCLPGSNDHPT

SEQ ID NO: 1561 - protein, 5 aa, Artificial
  Synthetic peptide
MWVLG

SEQ ID NO: 1562 - protein, 21 aa, Artificial
  Synthetic peptide
DTKRTNTLLFEMRHFAKQLTT

SEQ ID NO: 1563 - protein, 27 aa, Artificial
  Synthetic peptide
DRVSLCHEAGVQWNNFSTLQPLPPRLK

SEQ ID NO: 1564 - protein, 5 aa, Artificial
  Synthetic peptide
MWVLG

SEQ ID NO: 1565 - protein, 7 aa, Artificial
  Synthetic peptide
VRDPYRK

SEQ ID NO: 1566 - protein, 11 aa, Artificial
  Synthetic peptide
VRSSKPSFCLS

SEQ ID NO: 1567 - protein, 11 aa, Artificial
  Synthetic peptide
GNTEVLVLIQM

SEQ ID NO: 1568 - protein, 51 aa, Artificial
  Synthetic peptide
ALGVRQLVGGGHSSRFSHLVVAGLPHACHRKSGSSSQVLCPEPSALLSVAG

SEQ ID NO: 1569 - protein, 24 aa, Artificial
  Synthetic peptide
ELGFPSSTGRDESLEHCRCQGLHK

SEQ ID NO: 1570 - protein, 11 aa, Artificial
  Synthetic peptide
TTGVSTPAPGV

SEQ ID NO: 1571 - protein, 15 aa, Artificial
  Synthetic peptide
VRPCLPVPLLLCWPL

SEQ ID NO: 1572 - protein, 11 aa, Artificial
  Synthetic peptide
TTGVSTPAPGV

SEQ ID NO: 1573 - protein, 21 aa, Artificial
  Synthetic peptide
WCWWRRRGAAKAGPSGCRRWG

SEQ ID NO: 1574 - protein, 21 aa, Artificial
  Synthetic peptide
GTVQCEEAMVSCTVCSLHKGM

SEQ ID NO: 1575 - protein, 21 aa, Artificial
  Synthetic peptide
GTVQCEEAMVSCTVCSLHKGM

SEQ ID NO: 1576 - DNA, 1536 bp, Homo sapiens
gtgacgcgaggctctgcggagaccaggagtcagactgtaggacgacctcgggtcccacgtgtccccggtactcgccggccggagcccccggcttcccggggccgggggaccttagcggcacccacacacagcctactttccaagcggagccatgtctggtaacggcaatgcggctgcaacggcggaagaaaacagcccaaagatgagagtgattcgcgtgggtacccgcaagagccagcttgctcgcatacagacggacagtgtggtggcaacattgaaagcctcgtaccctggcctgcagtttgaaatcattgctatgtccaccacaggggacaagattcttgatactgcactctctaagattggagagaaaagcctgtttaccaaggagcttgaacatgccctggagaagaatgaagtggacctggttgttcactccttgaaggacctgcccactgtgcttcctcctggcttcaccatcggagccatctgcaagcgggaaaaccctcatgatgctgttgtctttcacccaaaatttgttgggaagaccctagaaaccctgccagagaagagtgtggtgggaaccagctccctgcgaagagcagcccagctgcagagaaagttcccgcatctggagttcaggagtattcggggaaacctcaacacccggcttcggaagctggacgagcagcaggagttcagtgccatcatcctggcaacagctggcctgcagcgcatgggctggcacaaccgggtggggcagatcctgcaccctgaggaatgcatgtatgctgtgggccagggggccttgggcgtggaagtgcgagccaaggaccaggacatcttggatctggtgggtgtgctgcacgatcccgagactctgcttcgctgcatcgctgaaagggccttcctgaggcacctggaaggaggctgcagtgtgccagtagccgtgcatacagctatgaaggatgggcaactgtacctgactggaggagtctggagtctagacggctcagatagcatacaagagaccatgcaggctaccatccatgtccctgcccagcatgaagatggccctgaggatgacccacagttggtaggcatcactgctcgtaacattccacgagggccccagttggctgcccagaacttgggcatcagcctggccaacttgttgctgagcaaaggagccaaaaacatcctggatgttgcacggcagcttaacgatgcccattaactggtttgtggggcacagatgcctgggttgctgctgtccagtgcctacatcccgggcctcagtgccccattctcactgctatctggggagtgattaccccgggagactgaactgcagggttcaagccttccagggatttgcctcaccttggggccttgatgactgccttgcctcctcagtatgtgggggcttcatctctttagagaagtccaagcaacagcctttgaatgtaaccaatcctactaataaaccagttctgaaggtaaaaaaaaaaaaaaaaaaaaaaaaaaaaaaaaaaa

SEQ ID NO: 1577 - DNA, 1331 bp, Homo sapiens
tcttgctgcgcctccgcctcctcctctgctccgccaccggcttcctcctcctgagcagtcagcccgcgcgccggccggctccgttatggcgacccgcagccctggcgtcgtgattagtgatgatgaaccaggttatgaccttgatttattttgcatacctaatcattatgctgaggatttggaaagggtgtttattcctcatggactaattatggacaggactgaacgtcttgctcgagatgtgatgaaggagatgggaggccatcacattgtagccctctgtgtgctcaaggggggctataaattctttgctgacctgctggattacatcaaagcactgaatagaaatagtgatagatccattcctatgactgtagattttatcagactgaagagctattgtaatgaccagtcaacaggggacataaaagtaattggtggagatgatctctcaactttaactggaaagaatgtcttgattgtggaagatataattgacactggcaaaacaatgcagactttgctttccttggtcaggcagtataatccaaagatggtcaaggtcgcaagcttgctggtgaaaaggaccccacgaagtgttggatataagccagactttgttggatttgaaattccagacaagtttgttgtaggatatgcccttgactataatgaatacttcagggatttgaatcatgtttgtgtcattagtgaaactggaaaagcaaaatacaaagcctaagatgagagttcaagttgagtttggaaacatctggagtcctattgacatcgccagtaaaattatcaatgttctagttctgtggccatctgcttagtagagctttttgcatgtatcttctaagaattttatctgttttgtactttagaaatgtcagttgctgcattcctaaactgtttatttgcactatgagcctatagactatcagttccctttgggcggattgttgtttaacttgtaaatgaaaaaattctcttaaaccacagcactattgagtgaaacattgaactcatatctgtaagaaataaagagaagatatattagttttttaattggtattttaatttttatatatgcaggaaagaatagaagtgattgaatattgttaattataccaccgtgtgttagaaaagtaagaagcagtcaattttcacatcaaagacagcatctaagaagttttgttctgtcctggaattattttagtagtgtttcagtaatgttgactgtattttccaacttgttcaaattattaccagtgaatctttgtcagcagttcccttttaaatgcaaatcaataaattcccaaaaattt

SEQ ID NO: 1578 - DNA, 2650 bp, Homo sapiens
agggacagcccagaggaggcgtggccacgctgccggcggaagtggagccctccgcgagcgcgcgaggccgccggggcaggcggggaaaccggacagtaggggcggggccgggccggcgatggggatgcgggagcactacgcggagctgcacccgtgcccgccggaattggggatgcagagcagcggcagcgggtatggcaggcagccggcgggccggcctccagcgcaggtgcccgagaggcaggggctggcctgggatgcgcgcgcacctgccctcgccccgccccgcccgcacgaggggtggtggccgaggccccgccccgcacgcctcgcctgaggcgggtccgctcagcccaggcgcccgcccccgcccccgccgattaaatgggccggcggggctcagcccccggaaacggtcgtaacttcggggctgcgagcgcggagggcgacgacgacgaagcgcagacagcgtcatggcagagcaggtggccctgagccggacccaggtgtgcgggatcctgcgggaagagcttttccagggcgatgccttccatcagtcggatacacacatattcatcatcatgggtgcatcgggtgacctggccaagaagaagatctaccccaccatctggtggctgttccgggatggccttctgcccgaaaacaccttcatcgtgggctatgcccgttcccgcctcacagtggctgacatccgcaaacagagtgagcccttcttcaaggccaccccagaggagaagctcaagctggaggacttctttgcccgcaactcctatgtggctggccagtacgatgatgcagcctcctaccagcgcctcaacagccacatggatgccctccacctggggtcacaggccaaccgcctcttctacctggccttgcccccgaccgtctacgaggccgtcaccaagaacattcacgagtcctgcatgagccagataggctggaaccgcatcatcgtggagaagcccttcgggagggacctgcagagctctgaccggctgtccaaccacatctcctccctgttccgtgaggaccagatctaccgcatcgaccactacctgggcaaggagatggtgcagaacctcatggtgctgagatttgccaacaggatcttcggccccatctggaaccgggacaacatcgcctgcgttatcctcaccttcaaggagccctttggcactgagggtcgcgggggctatttcgatgaatttgggatcatccgggacgtgatgcagaaccacctactgcagatgctgtgtctggtggccatggagaagcccgcctccaccaactcagatgacgtccgtgatgagaaggtcaaggtgttgaaatgcatctcagaggtgcaggccaacaatgtggtcctgggccagtacgtggggaaccccgatggagagggcgaggccaccaaagggtacctggacgaccccacggtgccccgcgggtccaccaccgccacttttgcagccgtcgtcctctatgtggagaatgagaggtgggatggggtgcccttcatcctgcgctgcggcaaggccctgaacgagcgcaaggccgaggtgaggctgcagttccatgatgtggccggcgacatcttccaccagcagtgcaagcgcaacgagctggtgatccgcgtgcagcccaacgaggccgtgtacaccaagatgatgaccaagaagccgggcatgttcttcaaccccgaggagtcggagctggacctgacctacggcaacagatacaagaacgtgaagctccctgacgcctacgagcgcctcatcctggacgtcttctgcgggagccagatgcacttcgtgcgcagcgacgagctccgtgaggcctggcgtattttcaccccactgctgcaccagattgagctggagaagcccaagcccatcccctatatttatggcagccgaggccccacggaggcagacgagctgatgaagagagtgggtttccagtatgagggcacctacaagtgggtgaacccccacaagctctgagccctgggcacccacctccacccccgccacggccaccctccttcccgccgcccgaccccgagtcgggaggactccgggaccattgacctcagctgcacattcctggccccgggctctggccaccctggcccgcccctcgctgctgctactacccgagcccagctacattcctcagctgccaagcactcgagaccatcctggcccctccagaccctgcctgagcccaggagctgagtcacctcctccactcactccagcccaacagaaggaaggaggagggcgcccattcgtctgtcccagagcttattggccactgggtctcactcctgagtggggccagggtgggagggagggacaagggggaggaaaggggcgagcacccacgtgagagaatctgcctgtggccttgcccgccagcctcagtgccacttgacattccttgtcaccagcaacatctcgagccccctggatgtcccctgtcccaccaactctgcactccatggccaccccgtgccacccgtaggcagcctctctgctataagaaaagcagacgcagcagctgggacccctcccaacctcaatgccctgccattaaatccgcaaacagccaaaaaaaaaaaaaaaaaaaa

SEQ ID NO: 1579 - DNA, 541 bp, Homo sapiens
cttttcgatccgccatctgcggtggagccgccaccaaaatgcagattttcgtgaaaacccttacggggaagaccatcaccctcgaggttgaaccctcggatacgatagaaaatgtaaaggccaagatccaggataaggaaggaattcctcctgatcagcagagactgatctttgctggcaagcagctggaagatggacgtactttgtctgactacaatattcaaaaggagtctactcttcatcttgtgttgagacttcgtggtggtgctaagaaaaggaagaagaagtcttacaccactcccaagaagaataagcacaagagaaagaaggttaagctggctgtcctgaaatattataaggtggatgagaatggcaaaattagtcgccttcgtcgagagtgcccttctgatgaatgtggtgctggggtgtttatggcaagtcactttgacagacattattgtggcaaatgttgtctgacttactgtttcaacaaaccagaagacaagtaactgtatgagttaataaaagacatgaactaaca

SEQ ID NO: 1580 - DNA, 748 bp, Homo sapiens
gcagataatgggaggagccgggcccgagcgagctctttcctttcgctgctgcggccgcagccatgagtatgctcaggcttcagaagaggctcgcctctagtgtcctccgctgtggcaagaagaaggtctggttagaccccaatgagaccaatgaaatcgccaatgccaactcccgtcagcagatccggaagctcatcaaagatgggctgatcatccgcaagcctgtgacggtccattcccgggctcgatgccggaaaaacaccttggcccgccggaagggcaggcacatgggcataggtaagcggaagggtacagccaatgcccgaatgccagagaaggtcacatggatgaggagaatgaggattttgcgccggctgctcagaagataccgtgaatctaagaagatcgatcgccacatgtatcacagcctgtacctgaaggtgaaggggaatgtgttcaaaaacaagcggattctcatggaacacatccacaagctgaaggcagacaaggcccgcaagaagctcctggctgaccaggctgaggcccgcaggtctaagaccaaggaagcacgcaagcgccgtgaagagcgcctccaggccaagaaggaggagatcatcaagactttatccaaggaggaagagaccaagaaataaaacctcccactttgtctgtacatactggcctctgtgattacatagatcagccattaaaataaaacaagccttaatctgcaaaaaaaaaaaaaaaa

SEQ ID NO: 1581 - DNA, 1867 bp, Homo sapiens
ggttcgctgtggcgggcgcctgggccgccggctgtttaacttcgcttccgctggcccatagtgatctttgcagtgacccagcagcatcactgtttcttggcgtgtgaagataacccaaggaattgaggaagttgctgagaagagtgtgctggagatgctctaggaaaaaattgaatagtgagacgagttccagcgcaagggtttctggtttgccaagaagaaagtgaacatcatggatcagaacaacagcctgccaccttacgctcagggcttggcctcccctcagggtgccatgactcccggaatccctatctttagtccaatgatgccttatggcactggactgaccccacagcctattcagaacaccaatagtctgtctattttggaagagcaacaaaggcagcagcagcaacaacaacagcagcagcagcagcagcagcagcaacagcaacagcagcagcagcagcagcagcagcagcagcagcagcagcagcagcagcagcagcagcaacaggcagtggcagctgcagccgttcagcagtcaacgtcccagcaggcaacacagggaacctcaggccaggcaccacagctcttccactcacagactctcacaactgcacccttgccgggcaccactccactgtatccctcccccatgactcccatgacccccatcactcctgccacgccagcttcggagagttctgggattgtaccgcagctgcaaaatattgtatccacagtgaatcttggttgtaaacttgacctaaagaccattgcacttcgtgcccgaaacgccgaatataatcccaagcggtttgctgcggtaatcatgaggataagagagccacgaaccacggcactgattttcagttctgggaaaatggtgtgcacaggagccaagagtgaagaacagtccagactggcagcaagaaaatatgctagagttgtacagaagttgggttttccagctaagttcttggacttcaagattcagaatatggtggggagctgtgatgtgaagtttcctataaggttagaaggccttgtgctcacccaccaacaatttagtagttatgagccagagttatttcctggtttaatctacagaatgatcaaacccagaattgttctccttatttttgtttctggaaaagttgtattaacaggtgctaaagtcagagcagaaatttatgaagcatttgaaaacatctaccctattctaaagggattcaggaagacgacgtaatggctctcatgtacccttgcctcccccacccccttctttttttttttttaaacaaatcagtttgttttggtacctttaaatggtggtgttgtgagaagatggatgttgagttgcagggtgtggcaccaggtgatgcccttctgtaagtgcccaccgcgggatgccgggaaggggcattatttgtgcactgagaacaccgcgcagcgtgactgtgagttgctcataccgtgctgctatctgggcagcgctgcccatttatttatatgtagattttaaacactgctgttgacaagttggtttgagggagaaaactttaagtgttaaagccacctctataattgattggactttttaattttaatgtttttccccatgaaccacagtttttatatttctaccagaaaagtaaaaatcttttttaaaagtgttgtttttctaatttataactcctaggggttatttctgtgccagacacattccacctctccagtattgcaggacagaatatatgtgttaatgaaaatgaatggctgtacatatttttttctttcttcagagtactctgtacaataaatgcagtttataaaagtgttaaaaaaaaaaaaaaaaaaaaaa

SEQ ID NO: 1582 - DNA, 2201 bp, Homo sapiens
cgggatttgggtcgcggttcttgtttgtggatcgctgtgatcgtcacttgacaatgcagatcttcgtgaagactctgactggtaagaccatcaccctcgaggttgagcccagtgacaccatcgagaatgtcaaggcaaagatccaagataaggaaggcatccctcctgaccagcagaggctgatctttgctggaaaacagctggaagatgggcgcaccctgtctgactacaacatccagaaagagtccaccctgcacctggtgctccgtctcagaggtgggatgcaaatcttcgtgaagacactcactggcaagaccatcacccttgaggtggagcccagtgacaccatcgagaacgtcaaagcaaagatccaggacaaggaaggcattcctcctgaccagcagaggttgatctttgccggaaagcagctggaagatgggcgcaccctgtctgactacaacatccagaaagagtctaccctgcacctggtgctccgtctcagaggtgggatgcagatcttcgtgaagaccctgactggtaagaccatcaccctcgaggtggagcccagtgacaccatcgagaatgtcaaggcaaagatccaagataaggaaggcattcctcctgatcagcagaggttgatctttgccggaaaacagctggaagatggtcgtaccctgtctgactacaacatccagaaagagtccaccttgcacctggtactccgtctcagaggtgggatgcaaatcttcgtgaagacactcactggcaagaccatcacccttgaggtcgagcccagtgacactatcgagaacgtcaaagcaaagatccaagacaaggaaggcattcctcctgaccagcagaggttgatctttgccggaaagcagctggaagatgggcgcaccctgtctgactacaacatccagaaagagtctaccctgcacctggtgctccgtctcagaggtgggatgcagatcttcgtgaagaccctgactggtaagaccatcaccctcgaagtggagccgagtgacaccattgagaatgtcaaggcaaagatccaagacaaggaaggcatccctcctgaccagcagaggttgatctttgccggaaaacagctggaagatggtcgtaccctgtctgactacaacatccagaaagagtccaccttgcacctggtgctccgtctcagaggtgggatgcagatcttcgtgaagaccctgactggtaagaccatcactctcgaggtggagccgagtgacaccattgagaatgtcaaggcaaagatccaagacaaggaaggcatccctcctgatcagcagaggttgatctttgctgggaaacagctggaagatggacgcaccctgtctgactacaacatccagaaagagtccaccctgcacctggtgctccgtcttagaggtgggatgcagatcttcgtgaagaccctgactggtaagaccatcactctcgaagtggagccgagtgacaccattgagaatgtcaaggcaaagatccaagacaaggaaggcatccctcctgaccagcagaggttgatctttgctgggaaacagctggaagatggacgcaccctgtctgactacaacatccagaaagagtccaccctgcacctggtgctccgtcttagaggtgggatgcagatcttcgtgaagaccctgactggtaagaccatcactctcgaagtggagccgagtgacaccattgagaatgtcaaggcaaagatccaagacaaggaaggcatccctcctgaccagcagaggttgatctttgctgggaaacagctggaagatggacgcaccctgtctgactacaacatccagaaagagtccaccctgcacctggtgctccgtctcagaggtgggatgcagatcttcgtgaagaccctgactggtaagaccatcaccctcgaggtggagcccagtgacaccatcgagaatgtcaaggcaaagatccaagataaggaaggcatccctcctgatcagcagaggttgatctttgctgggaaacagctggaagatggacgcaccctgtctgactacaacatccagaaagagtccactctgcacttggtcctgcgcttgagggggggtgtctaagtttccccttttaaggtttcaacaaatttcattgcactttcctttcaataaagttgttgcattcccaaaaaaaaaaaaaaaaaaaaaaaa

SEQ ID NO: 1583 - DNA, 2277 bp, Homo sapiens
gactgcgcggcggcaacagcagacatgtcgggggtccggggcctgtcgcggctgctgagcgctcggcgcctggcgctggccaaggcgtggccaacagtgttgcaaacaggaacccgaggttttcacttcactgttgatgggaacaagagggcatctgctaaagtttcagattccatttctgctcagtatccagtagtggatcatgaatttgatgcagtggtggtaggcgctggaggggcaggcttgcgagctgcatttggcctttctgaggcagggtttaatacagcatgtgttaccaagctgtttcctaccaggtcacacactgttgcagcgcagggaggaatcaatgctgctctggggaacatggaggaggacaactggaggtggcatttctacgacaccgtgaagggctccgactggctgggggaccaggatgccatccactacatgacggagcaggcccccgccgccgtggtcgagctagaaaattatggcatgccgtttagcagaactgaagatgggaagatttatcagcgtgcatttggtggacagagcctcaagtttggaaagggcgggcaggcccatcggtgctgctgtgtggctgatcggactggccactcgctattgcacaccttatatggacggtctctgcgatatgataccagctattttgtggagtattttgccttggatctcctgatggagaacggggagtgccgtggtgtcatcgcactgtgcatagaggacgggtccatccatcgcataagagcaaagaacactgttgttgccacaggaggctacgggcgcacctacttcagctgcacgtctgcccacaccagcactggcgacggcacggccatgatcaccagggcaggccttccttgccaggacctagagtttgttcagttccaccccacaggcatatatggtgctggttgtctcattacggaaggatgtcgtggagagggaggcattctcattaacagtcaaggcgaaaggtttatggagcgatacgcccctgtcgcgaaggacctggcgtctagagatgtggtgtctcggtcgatgactctggagatccgagaaggaagaggctgtggccctgagaaagatcacgtctacctgcagctgcaccacctacctccagagcagctggccacgcgcctgcctggcatttcagagacagccatgatcttcgctggcgtggacgtcacgaaggagccgatccctgtcctccccaccgtgcattataacatgggcggcattcccaccaactacaaggggcaggtcctgaggcacgtgaatggccaggatcagattgtgcccggcctgtacgcctgtggggaggccgcctgtgcctcggtacatggtgccaaccgcctcggggcaaactcgctcttggacctggttgtctttggtcgggcatgtgccctgagcatcgaagagtcatgcaggcctggagataaagtccctccaattaaaccaaacgctggggaagaatctgtcatgaatcttgacaaattgagatttgctgatggaagcataagaacatcggaactgcgactcagcatgcagaagtcaatgcaaaatcatgctgccgtgttccgtgtgggaagcgtgttgcaagaaggttgtgggaaaatcagcaagctctatggagacctaaagcacctgaagacgttcgaccggggaatggtctggaacacagacctggtggagaccctggagctgcagaacctgatgctgtgtgcgctgcagaccatctacggagcagaggcgcggaaggagtcacggggcgcgcatgccagggaagactacaaggtgcggattgatgagtacgattactccaagcccatccaggggcaacagaagaagccctttgaggagcactggaggaagcacaccctgtcctttgtggacgttggcactgggaaggtcactctggaatatagacccgtaatcgacaaaactttgaacgaggctgactgtgccaccatcccgccagccattcgctcctactgatgagacaagatgtggtgatgacagaatcagcttttgtaattatgtataatagctcatgcatgtgtccatgtcataactgtcttcatacgcttctgcactctggggaagaaggagtacattgaagggagattggcacctagtggctgggagcttgccaggaacccagtggccagggagcgtggcacttacctttgtcccttgcttcattcttgtgagatgataaaactgggcacagctcttaaataaaatataaatgag
